(19) United States
(12) Patent Application Publication
(10) Pub. No.: US 2005/0027113 A1
(43) Pub. Date: Feb. 3, 2005

(54) Compositions and methods relating to the daptomycin biosynthetic gene cluster

(76) Inventors: Vivian Pak Woon Miao, Surrey (CA); Paul Brian, Waltham, MA (US); Richard H. Baltz, Lincoln, MA (US); Marie Francoise Coeffet-LeGal, Arlington, MA (US)

Correspondence Address: CUBIST PHARMACEUTICALS, INC., 65 HAYDEN AVENUE, LEXINGTON, MA, 02421, US

(21) Appl. No.: 10/211,028

(22) Filed: Jul. 31, 2002

Related U.S. Application Data
(63) Continuation-in-part of application No. PCT/US01/32354, filed on Oct. 17, 2001.
(60) Provisional application No. 60/379,866, filed on May 10, 2002.
(60) Provisional application No. 60/310,385, filed on Aug. 6, 2001.

(51) Int. Cl. C12Q 1/68; C07H 21/04; C12P 19/00; C12N 9/24; C12P 21/02; C12N 1/21

(52) U.S. Cl. 536/23.2; 435/6; 435/252.31; 435/320.1; 435/69.1; 435/72; 435/200

(57) ABSTRACT

The invention provides nucleic acid molecules comprising all or a part of a daptomycin biosynthetic gene cluster. The daptomycin biosynthetic gene cluster may be derived from Streptomyces, preferably from S. roseosporus. The invention also provides other nucleic acid molecules from S. roseosporus. The invention further provides polypeptides encoded by the nucleic acid molecules, antibodies that specifically bind to the polypeptides, and methods of using the nucleic acid molecules, polypeptides and antibodies to produce daptomycin and other compounds.

### BACKGROUND OF THE INVENTION

[0001] Bacteria, including actinomycetes, and fungi synthesize a diverse array of low molecular weight peptide and polyketide compounds (approx. 2-48 residues in length). The biosynthesis of these compounds is catalyzed by non-ribosomal peptide synthetases (NRPSs) and by polyketide syntheses (PKSs). The NRPS process, which does not involve ribosome-mediated RNA translation according to the genetic code, is capable of producing peptides that exhibit enormous structural diversity, compared to peptides translated from RNA templates by ribosomes. These include the incorporation of D- and L-amino acids and hydroxy acids; variations within the peptide backbone which form linear, cyclic or branched cyclic structures; and additional structural modifications, including oxidation, acylation, glycosylation, N-methylation and heterocyclic ring formation. Many non-ribosomally synthesized peptides have been found which have useful pharmacological (e.g., antibiotic, antiviral, antifungal, antiparasitic, siderophore, cytostatic, immunosuppressive, anti-cholesterolemic and anticancer), agrochemical or physicochemical (e.g., biosurfactant) properties.

[0002] Non-ribosomally synthesized peptides are assembled by large (e.g., about 200-2000 kDa), multifunctional NRPS enzyme complexes comprising one or more subunits. Examples include daptomycin, vancomycin, echinocandin and cyclosporin. Likewise, polyketides are assembled by large multifunctional PKS enzyme complexes comprising one or more subunits. Examples include erythromycin, tylosin, monensin and avermectin. In some cases, complex molecules can be synthesized by mixed PKS/NRPS systems. Examples include rapamycin, bleomycin and epothilone.

[0003] An NRPS usually consists of one or more open reading frames that make up an NRPS complex. The NRPS complex acts as a protein template, comprising a series of protein biosynthetic units configured to bind and activate specific building block substrates and to catalyze peptide chain formation and elongation. (See, e.g., Konz and Marahiel, Chem. Biol., 6, pp. 39-48 (1999) and references cited therein; von Döhren et al., Chem. Biol., 6, pp. 273-279, (1999) and references cited therein; and Cane and Walsh, Chem. Biol., 6, pp. 319-325, (1999), and references cited therein—each hereby incorporated by reference in its entirety). Each NRPS or NRPS subunit comprises one or modules. A “module” is defined as the catalytic unit that incorporates a single building block (e.g., an amino acid) into the growing peptide chain. The order and specificity of the biosynthetic modules that form the NRPS protein template dictates the sequence and structure of the ultimate peptide products.

[0004] Each module of an NRPS acts as a semi-autonomous active site containing discrete, folded protein domains responsible for catalyzing specific reactions required for peptide chain elongation. A minimal module (in a single module complex) consists of at least two core domains: 1) an adenylation domain responsible for activating an amino acid (or, occasionally, a hydroxy acid); and 2) a thiolation or acyl carrier domain responsible for transferring activated intermediates to an enzyme-bound pantetheine cofactor. Most modules also contain 3) a condensation domain responsible for catalyzing peptide bond formation between activated intermediates. See FIG. 9. Supplementing these three core domains are a variable number of additional domains which can mediate, e.g., N-methylation (M or methylation domain) and L- to D-conversion (E or epimerization domain) of a bound amino acid intermediate, and heterocyclic ring formation (Cy or cyclization domain). The domains are usually characterized by specific amino acid motifs or features. It is the combination of such auxiliary domains acting locally on tethered intermediates within nearby modules that contributes to the enormous structural and functional diversity of the mature peptide products assembled by NRPS and mixed NRPS/PKS enzyme complexes.

[0005] The adenylation domain of each minimal module catalyzes the specific recognition and activation of a cognate amino acid. In this early step of non-ribosomal peptide biosynthesis, the cognate amino acid of each NRPS module is bound to the adenylation domain and activated as an unstable acyl adenylate (with concomitant ATP-hydrolysis). See, e.g., Stachelhaus et al., Chem. Biol. 6: 493-505 (1999) and Challis et al., Chem. Biol. 7: 211-224 (2000), each incorporated herein by reference in its entirety. In most NRPS modules, the acyl adenylate intermediate is next transferred to the T (thiolation) domain (also referred to as a peptidyl carrier protein or PCP domain) of the module where it is converted to a thioester intermediate and tethered via a transthiolation reaction to a covalently bound enzyme cofactor (4′-phosphopantetheinyl (4′-PP) intermediate). Modules responsible for incorporating D-configured or N-methylated amino acids may have extra modifying domains which, in several NRPSs studied, are located between the A and T domains.

[0006] The enzyme-bound intermediates in each module are then assembled into the peptide product by stepwise condensation reactions involving transfer of the thioester-activated carboxyl group of one residue in one module to, e.g., the adjacent amino group of the next amino acid in the next module while the intermediates remain linked covalently to the NRPS. Each condensation reaction is catalyzed by a condensation (C) domain which is usually positioned between two minimal modules. The number of condensation domains in a NRPS generally corresponds to the number of peptide bonds present in the final (linear) peptide. An extra C domain has been found in several NRPSs (e.g., at the amino terminus of cyclosporin synthetase and the carboxyl terminus of rapamycin; see, e.g., Konz and Marahiel, supra) that has been proposed to be involved in peptide chain termination and cyclization reactions. Many other NRPS complexes, however, release the full length chain in a reaction catalyzed by a C-terminal thioesterase (Te) domain (of approximately 28K-35K relative molecular weight).

[0007] Thioesterase domains of most NRPS complexes use a catalytic triad (similar to that of the well-known chymotrypsin mechanism) which includes a conserved serine (less often a cysteine or aspartate) residue in a conserved three-dimensional configuration relative to a histidine and an acidic residue. See, e.g. V. De Crecy-Lagard in Comprehensive Natural Products Chemistry, Volume 4, ed. J. W. Kelly (N.Y.: Elsevier), 1999, pp. 221-238, each incorporated herein by reference in its entirety. Thioester cleavage is a two step process. In the first (acylation) step, the full length peptide chain is transferred from the thiol tethered enzyme intermediate in the thiolation domain (see above) to the conserved serine residue in the Te domain, forming an acyl-O-Te ester intermediate. In the second (deacylation) step, the Te domain serine ester intermediate is either hydrolyzed (thereby releasing a linear, full length product) or undergoes cyclization, depending on whether the ester intermediate is attacked by water (hydrolysis) or by an activated intramolecular nucleophile (cyclization).

[0008] Sequence comparisons of C-terminal thioesterase domains from diverse members of the NRPS superfamily have revealed a conserved motif comprising the serine catalytic residue (GXSXG motif), often followed by an aspartic acid residue about 25 amino acids downstream from the conserved serine residue. A second type of thioesterase, a free thioesterase enzyme, is known to participate in the biosynthesis of some peptide and polyketide secondary metabolites. See e.g., Schneider and Marahiel, Arch. Microbiol., 169, pp. 404-410 (1998), and Butler et al., Chem. Biol., 6, pp. 87-292 (1999), each incorporated herein by reference in its entirety. These thioesterases are often required for efficient natural product synthesis. Butler et al. have postulated that the free thioesterase found in the polyketide tylosin gene cluster—which is required for efficient tylosin production—may be involved in editing and proofreading functions.

[0009] The modular organization of the NRPS multienzyme complex is mirrored at the level of the genomic DNA encoding the modules. The organization and DNA sequences of the genes encoding several different NRPSs have been studied. (See, e.g., Marahiel, Chem. Biol., 4, pp. 561-567 (1997), incorporated herein by reference in its entirety). Conserved sequences characterizing particular NRPS functional domains have been identified by comparing NRPS sequences derived from many diverse organisms and those conserved sequence motifs have been used to design probes useful for identifying and isolating new NRPS genes and modules.

[0010] The modular structures of PKS and NRPS enzyme complexes can be exploited to engineer novel enzymes having new specificities by changing the numbers and positions of the modules at the DNA level by genetic engineering and recombination in vivo. Functional hybrid NRPSs have been constructed, for example, based on whole-module fusions. See, e.g., Gokhale et al., Science, 284, pp. 482-485 (1999); Mootz et al., Proc. Natl. Acad. Sci. U.S.A., 97, pp. 5848-5853 (2000), incorporated herein by reference in their entirety. Recombinant techniques may be used to successfully swap domains originating from a heterologous PKS or NRPS complex. See, e.g., Schneider et al., Mol. Gen. Genet., 257, pp. 308-318 (1998); McDaniel et al., Proc. Natl. Acad. Sci. U.S.A., 96, pp. 1846-1851 (1999); U.S. Pat. Nos. 5,652,116 and 5,795,738; and International Publication WO 00/56896; incorporated herein by reference in their entirety.

[0011] Engineering a new substrate specificity within a module by altering residues which form the substrate binding pocket of the adenylation domain has also been described. See, e.g., Cane and Walsh, Chem. Biol., 6, 319-325 (1999); Stachelhaus et al., Chem. Biol., 6, 493-505 (1999); and WO 00/52152; each incorporated herein by reference in its entirety. By comparing the sequence of the B. subtilis peptide synthetase GrsA adenylation domain (PheA) (whose structure is known) with sequences of 160 other adenylation domains from pro- and eukaryotic NPRSs, for example, Stachelhaus et al. (supra) and Challis et al., Chem. Biol., 7, pp. 211-224 (2000) defined adenylation (A) domain signature sequences (analogous to codons of the genetic code) for a variety of amino acid substrates. From the collection of those signature sequences, a putative NRPS selectivity-conferring code (with degeneracies like the genetic code) was formulated.

[0012] The ability to engineer NRPSs having new modular template structures and new substrate specificities by adding, deleting or exchanging modules (or by adding, deleting or exchanging domains within one or more modules) will enable the production of novel peptides having altered and potentially advantageous properties. A combinatorial library comprising over 50 novel polyketides, for example, was prepared by systematically modifying the PKS that synthesizes an erythromycin precursor (DEBS) by substituting counterpart sequences from the rapamycin PKS (which encodes alternative substrate specificities). See, e.g., WO 00/63361 and McDaniel et al., (1999), supra, each incorporated herein by reference in its entirety.

[0013] A number of bacteria that produce antibiotics and other potentially toxic compounds synthesize ATP-binding cassette (ABC) transporters. ABC transporters use proton-dependent transmembrane electrochemical potential to export toxic cellular metabolites such as antibiotics, and to import materials from the environment, e.g. iron or other metals. There are three types of ABC transporters and genes encoding pumps responsible for antibiotic resistance, and they are often linked to the biosynthetic cluster in antibiotic producer organisms (e.g. actinorhodin resistance in Streptomyces coelicolor). See, e.g., Mendez et al., FEMS Microbiol. Lett. 158: 1-8 (1998), herein incorporated by reference. All have ATP-binding regions that include Walker A and B motifs. Id. Type I systems involve separate genes for a hydrophilic ATP-binding domain and a hydrophobic integral membrane domain. Type III systems involve a single gene encoding a protein with a hydrophobic N-terminus and a hydrophilic, ATP-binding C-terminus. Type II transporters have no hydrophobic domain, and two sets of Walker motifs, in the order A:B:A:B.

[0014] The Streptomyces glaucescens genes, StrV (PIR Accession No. S57561) and StrW (PIR Accession No. S57562) encode type III transporters associated with resistance to streptomycin-related compounds. Both genes are within a 5′-hydroxystreptomycin antibiotic biosynthetic gene cluster. See, e.g., Beyer et al., Mol. Gen. Genet. 250: 775-84 (1996), herein incorporated by reference. Resistance to doxorubicin and related antibiotics is conferred by two type I transporters in Streptomyces peucetius, which are encoded by drrA and drrB. See, e.g., Guifoile et al., Proc. Natl. Acad. Sci. USA 88:8553-57 (1991), herein incorporated by reference. Further, homologs of drrAB isolated from Streptomyces rochei confer multidrug resistance when expressed under control of the actinorhodin PKS promoter in S. lividans. See, e.g., Fernandez-Moreno et al., J. Bacteriol. 179: 6929-36 (1998), herein incorporated by reference.

[0015] Daptomycin (described by R. H. Baltz in Biotechnology of Antibiotics, 2nd Ed., ed. W. R. Strohl (New York: Marcel Dekker, Inc.), 1997, pp. 415-435) is an example of a non-ribosomally synthesized peptide made by a NRPS. Daptomycin, also known as LY146032, is a cyclic lipopeptide antibiotic that is produced by the fermentation of Streptomyces roseosporus. Daptomycin is a member of the factor A-21978C type antibiotics of S. roseosporus and comprises an n-decanoyl side chain linked via a three-amino acid chain to the N-terminal tryptophan of a cyclic 10-amino acid peptide. The compound is being developed in a variety of formulations to treat serious infections for which therapeutic options are limited, such as infections caused by bacteria including, but not limited to, methicillin resistant Staphylococcus aureus, vancomycin resistant enterococci, glycopeptide intermediary susceptible Staphylococcus aureus, coagulase-negative staphylococci, and penicillin-resistant Streptococcus pneumoniae. See, e.g., Tally et al., Exp. Opin. Invest. Drugs 8:1223-1238, 1999. The antibiotic action of daptomycin against Gram-positive bacteria has been attributed to its ability to interfere with membrane potential and to inhibit lipoteichoic acid synthesis.

[0016] Identification of the genes encoding the proteins involved in the daptomycin biosynthetic pathway, including the daptomycin NRPS, will provide a first step in producing modified Streptomyces roseosporus as well as other host strains which can produce an improved antibiotic (for example, having greater potency); which can produce natural or new antibiotics in increased quantities; or which can produce other peptide products having useful biological properties. Compositions and methods relating to the Streptomyces roseosporus daptomycin biosynthetic gene cluster, including isolated nucleic acids and isolated proteins, are described in U.S. Provisional Applications 60/240,879, filed Oct. 17, 2000; 60/272,207, filed Feb. 28, 2001; and 60/310,385, filed Aug. 8, 2001; all of which are hereby incorporated by reference in its entirety.

[0017] It would be advantageous, moreover, to identify the genetic and modular organization of the Streptomyces roseosporus daptomycin biosynthetic gene cluster in order to construct full length daptomycin NRPS templates for expression in Streptomyces roseosporus and in heterologous hosts. In particular, it would be advantageous to know whether the daptomycin gene cluster comprises a thioesterase (Te) domain. If so, that Te domain could be isolated and used to catalyze peptide chain termination in new NRPS modules and templates by expression as a fusion or as a free peptide. See, e.g., de Ferra et al., J. Biol. Chem., 272, pp. 25304-25309 (1997); Guenzi et al., J. Biol. Chem., 273, pp. 14403-14410 (1998); and Trauger et al., Nature, 407, pp. 215-218 (2000); each incorporated herein by reference in its entirety. It would also be advantageous to identify other nucleic acid molecules that encode polypeptides involved in daptomycin biosynthesis. These include, without limitation, enzymes involved in attaching a lipid tail to the peptide domain of daptomycin, polypeptides that regulate antibiotic resistance and ABC transporters. Polypeptides that regulate antibiotic resistance and ABC transporters could be used to confer resistance or increase, modify or decrease resistance of a bacteria to daptomycin and related antibiotics. Polypeptides involved in antibiotic resistance would also be useful to determine bacterial mechanisms of resistance, so that daptomycin and related antibiotics can be modified to make them more potent against resistant bacteria.

### SUMMARY OF THE INVENTION

[0018] The instant invention addresses these problems by providing a nucleic acid molecule that comprises all or a part of a daptomycin biosynthetic gene cluster, preferably one from S. roseosporus. The nucleic acid molecule may encode DptA, DptBC or DptD or may comprise one or more of the dptA, dptBC or dptD genes from the daptomycin biosynthetic gene cluster of S. roseosporus.

[0019] The instant invention also provides nucleic acid molecules encoding a free thioesterase and an integral thioesterase from a daptomycin biosynthetic gene cluster. The nucleic acid molecule may encode DptH or the thioesterase domain from DptD, or may comprise the dptH or dptD gene from the daptomycin biosynthetic gene cluster.

[0020] Another object of the invention is to provide a nucleic acid molecule comprising a DNA sequence from a bacterial artificial chromosome comprising a nucleic acid sequence from S. roseosporus. The nucleic acid molecule preferably comprises a S. roseosporus nucleic acid sequence from any one of bacterial artificial chromosome (BAC) clones B12:01G05, B12:06A12, B12:12F06, B12:18H04, B12:20C09 or B12:03A05. (Of these, only B12:03A05 has been deposited; ATCC Deposit No. PTA-3141, deposited Mar. 1, 2001). In a preferred embodiment, the nucleic acid molecule encodes a polypeptide. In another preferred embodiment, the nucleic acid molecule encodes a polypeptide that is involved in daptomycin biosynthesis, such as a dptA, dptBC, dptD, dptE, dptF, dptH, an ABC transporter, or a polypeptide that regulates antibiotic resistance, as described herein.

[0021] The invention also provides selectively hybridizing or homologous nucleic acid molecules of the above-described nucleic acid molecules. The invention further provides allelic variants and parts thereof. The invention further provides nucleic acid molecules that comprise one or more expression control sequences controlling the transcription of the above-described nucleic acid molecules. The expression control sequence may be derived from the expression control sequences of the daptomycin biosynthetic gene cluster or may be derived from a heterologous nucleic acid sequence.

[0022] In another embodiment, the invention provides a nucleic acid molecule comprising one or more expression control sequences from a gene comprising a nucleic acid sequence that encodes a thioesterase and/or a daptomycin NRPS from the daptomycin biosynthetic gene cluster. Preferably, the nucleic acid molecule comprises a part or all of the expression control sequences of the daptomycin NRPS or dptH.

[0023] Another object of the invention is to provide a vector and/or host cell comprising one or more of the above-described nucleic acid molecules. In a preferred embodiment, the vector and/or host cell comprises a nucleic acid molecule encoding all or part of DptA, DptBC, DptD, DptE, DptF and/or DptH, or all or part of a BAC clone described above. A host cell may comprise all or a part of an NRPS or PKS, such as a daptomycin NRPS. The host cell may further comprise one or more thioesterases.

[0024] Another object of the invention is to provide a polypeptide derived from the daptomycin biosynthetic gene cluster, preferably a polypeptide from the daptomycin biosynthetic gene cluster of S. roseosporus. The polypeptide may be DptA, DptBC or DptD.

[0025] The invention also provides a polypeptide derived from an integral or free thioesterase, preferably one derived from a daptomycin biosynthetic gene cluster of S. roseosporus. In a preferred embodiment, the polypeptide is derived from thioesterase. The polypeptide may be derived from DptH or the thioesterase domain of DptD.

[0026] The invention also provides a polypeptide encoded by a nucleic acid molecule of any one of BAC clones B12:01G05, B12:06A12, B12:12F06, B12:18H04, B12:20C09 or B12:03A05. These polypeptides include, among others, enzymes involved in attaching a lipid tail to the peptide domain of daptomycin, polypeptides that regulate antibiotic resistance and ABC transporters.

[0027] Another object of the invention is to provide fragments of the polypeptides described above. In one embodiment, the fragment comprises at least one domain or module, as defined herein. In another embodiment, the fragment comprises at least one epitope of the polypeptide.

[0028] Another object of the invention is to provide polypeptides that are mutant proteins, fusion proteins, homologous proteins or allelic variants of the daptomycin NRPS polypeptides, thioesterases and polypeptides encoded by the nucleic acid molecules of the BAC clones provided herein.

[0029] The invention also provides an antibody that specifically binds to a polypeptide of a daptomycin NRPS, a thioesterase polypeptide of a daptomycin biosynthetic gene cluster or a polypeptide encoded by a nucleic acid molecule from any one of BAC clones B12:01G05, B12:06A12, B12:12F06, B12:18H04, B12:20C09 or B12:03A05. The invention also provides an antibody that can bind to a fragment, polypeptide mutant, a fusion protein, a polypeptide encoded by an allelic variant or a homologous protein of any one of the above-described polypeptides or proteins. The antibodies may be used to detect the presence or amount of a polypeptide of the instant invention or to inhibit or activate an activity of a polypeptide.

[0030] Another objective of the instant invention is to provide a method for recombinantly producing a polypeptide using a nucleic acid molecule described herein by introducing a nucleic acid molecule into a host cell and expressing the polypeptide.

[0031] The instant invention also provides a method for using the nucleic acid molecules of the instant invention to detect or amplify nucleic acid molecules that have similar or identical nucleic acid sequences compared to the nucleic acid molecules described herein.

[0032] The nucleic acid molecules and polypeptides are useful for, for example, the biosynthesis and production of natural products and the engineered biosynthesis of new compounds. The daptomycin NRPS and/or thioesterases may be used to produce daptomycin and other lipopeptides, including both naturally-occurring and novel compounds. The polypeptides may be used in vitro for the production of cyclic or non-cyclic lipopeptides, as well as other compounds produced by non-ribosomal peptide synthesis. Alternatively, a nucleic acid molecule of the invention may be introduced and expressed in a host cell, and the host cell may then be used to produce lipopeptides and other compounds produced by non-ribosomal peptide synthesis.

[0033] Another objective of the invention is to provide a novel gene cluster that can produce novel compounds by non-ribosomal peptide synthesis. A novel gene cluster may be obtained by altering nucleotides of the daptomycin biosynthetic gene cluster, particularly by altering nucleotides, domains or modules of the daptomycin NRPS, to make new polypeptides that are involved in non-ribosomal peptide synthesis. In this manner, different amino acids may be incorporated into a peptide produced by non-ribosomal peptide synthesis than the peptide produced by a naturally-occurring polypeptide. The invention also encompasses the compounds produced by the methods described herein.

[0034] Another objective of the invention is to provide a computer readable means of storing the nucleic acid and amino acid sequences of the instant invention. The records of the computer readable means can be accessed for reading and display of sequences and for comparison, alignment and ordering of the sequences of the invention to other sequences.

### BRIEF DESCRIPTION OF THE DRAWINGS

[0035] FIG. 1 is a schematic diagram of methods in which daptomycin NRPS genes can be manipulated to alter gene expression or expression of the encoded proteins.

[0036] FIG. 2A is a schematic diagram of BAC clone B12:03A05. The diagram shows a 90 kb region, referred to as the 90 kb fragment, an approximately 13 kb region, referred to herein as the SP6 fragment, and an approximately 25-28 kb region, referred to herein as the GTC2 fragment. SEQ ID NO: 1 shows the nucleic acid sequence of the 90 kb fragment. SEQ ID NO: 103 shows the nucleic acid sequence of the SP6 fragment. The SP6 fragment flanks the 90 kb fragment at the left. The GTC2 fragment flanks the 90 kb fragment on the right. SEQ ID NO: 104 shows the nucleic acid sequence of the GTC2 fragment.

[0037] FIG. 2B shows a schematic diagram of the 90 kb fragment. There are 38 open reading frames (ORFs), which are nucleic acid sequences that encode polypeptides, in the region of the daptomycin biosynthetic gene cluster.

[0038] FIG. 2C shows a schematic diagram of the SP6 fragment. There are 9 ORFs in the SP6 fragment. See Table 5 for the amino acid and nucleic acid sequence identifiers for the ORFs of the 90 kb and the SP6 fragment.

[0039] FIG. 2D shows a schematic diagram of the GTC2 fragment.

[0040] FIG. 3 shows a comparison of the amino acid sequences of DptD (SEQ ID NO: 7) and the calcium dependent antibiotic (CDA) III protein of Streptomyces coelicolor (SEQ ID NO: 164) using the Clustal W program. See Example 3.

[0041] FIG. 4 shows a comparison of the amino acid sequences of DptH (SEQ ID NO: 8) and the probable hydrolase (presumed thioesterase) associated with the CDA NRPS of Streptomyces coelicolor (SEQ ID NO: 165) using the Clustal W program. See Example 3.

[0042] FIGS. 5A-5C shows an analysis of daptomycin or A21978C lipopeptides produced from the Streptomyces lividans TK64 clone containing the daptomycin biosynthetic gene cluster CBUK138742 (ATCC Deposit PTA-3140, deposited Mar. 1, 2001). FIG. 5A shows an HPLC analysis of the broth of CBUK138742. The lower panel shows a trace plotting the maximum absorbance observed over the range of 200-600 nm for the HPLC eluate against time. The presence of three native lipopeptides, lipopeptides A21978C1 (the C1 lipopeptide), A21978C2 (the C2 lipopeptide) and A21978C3 (the C3 lipopeptide), is indicated by peaks with retention times of 5.61, 5.77 and 5.89 minutes, respectively. The upper panel shows the UV-visible spectra observed for these peaks. FIG. 5B shows an ESI mass spectrum of daptomycin purified from decanoic acid-fed fermentation of Streptomyces lividans TK64 clone containing the daptomycin gene cluster. FIG. 5C shows a 1H NMR spectrum (400 MHz, in d6-DMSO) of daptomycin purified from decanoic acid-fed fermentation of CBUK138742.

[0043] FIG. 6 is a diagram of the cloning vector pStreptoBAC V.

[0044] FIG. 7 shows a HinDIII digest of BAC clones from the daptomycin biosynthetic gene cluster. Lane 1 shows B12:01G05 (82 kb insert); Lane 2 shows B12:03A05 (120 kb insert); Lane 3 shows B12:06A12 (85 kb insert); Lane 3 shows B12:12FG06 (65 kb insert); Lane 5 shows B12:18H04 (46 kb insert) and Lane 6 shows B12:20C09 (65 kb insert).

[0045] FIG. 8 shows a map of some BAC clones that cover approximately 180 to 200 kb of the daptomycin NPRS region in Streptomyces roseosporus.

[0046] FIG. 9 is a schematic diagram of the gene structure of an NRPS.

[0047] FIG. 10 is a dendrogram showing the adenylation (A) domain similarities for domains that specify Asn and Asp in the daptomycin NRPS and in the CDA NRPS from Streptomyces coelicolor. See Example 5.

[0048] FIG. 11 shows the results of an HPLC analysis determining the stereochemistry of Asn. See Example 6.

[0049] FIG. 12 is a schematic diagram showing the organization of the daptomycin NRPS.

[0050] FIG. 13 shows a 1H NMR spectrum the novel lipopeptide produced as described in Example 12C.

### DETAILED DESCRIPTION OF THE INVENTION

[0051] Definitions and General Techniques

[0052] Unless otherwise defined herein, scientific and technical terms used in connection with the present invention shall have the meanings that are commonly understood by those of ordinary skill in the art. Further, unless otherwise required by context, singular terms shall include pluralities and plural terms shall include the singular. Generally, nomenclatures used in connection with, and techniques of, cell and tissue culture, molecular biology, immunology, microbiology, genetics and protein and nucleic acid chemistry and hybridization described herein are those well known and commonly used in the art. The methods and techniques of the present invention are generally performed according to conventional methods well known in the art and as described in various general and more specific references that are cited and discussed throughout the present specification unless otherwise indicated. See, e.g., Sambrook et al. Molecular Cloning: A Laboratory Manual, 2d ed., Cold Spring Harbor Laboratory Press, Cold Spring Harbor, N.Y. (1989); Sambrook et al. Molecular Cloning: A Laboratory Manual, 3d ed., Cold Spring Harbor Laboratory Press, Cold Spring Harbor, N.Y. (2000); Ausubel et al., Current Protocols in Molecular Biology, Greene Publishing Associates (1992, and Supplements to 2000); Ausubel et al., Short Protocols in Molecular Biology: A Compendium of Methods from Current Protocols in Molecular Biology, 4th ed., Wiley & Sons (1999); Harlow and Lane Antibodies: A Laboratory Manual, Cold Spring Harbor Laboratory Press, Cold Spring Harbor, N.Y. (1990); Harlow and Lane Using Antibodies: A Laboratory Manual, Cold Spring Harbor Laboratory Press, Cold Spring Harbor, N.Y. (1998); and T. Kieser et al., Practical Streptomyces Genetics, John Innes Foundation, Norwich (2000); each of which is incorporated herein by reference in its entirety.

[0053] Enzymatic reactions and purification techniques are performed according to manufacturer's specifications, as commonly accomplished in the art or as described herein. The nomenclatures used in connection with, and the laboratory procedures and techniques of, analytical chemistry, synthetic organic chemistry, and medicinal and pharmaceutical chemistry described herein are those well known and commonly used in the art. Standard techniques are used for chemical syntheses, chemical analyses, pharmaceutical preparation, formulation, and delivery, and treatment of patients.

[0054] The following terms, unless otherwise indicated, shall be understood to have the following meanings:

[0055] The term “thioesterase” refers to an enzyme that is capable of catalyzing the cleavage of a thioester bond, which may result in the production of a cyclic or linear molecule.

[0056] The term “thioesterase activity” refers to an enzymatic activity of a thioesterase, or a mutein, homologous protein, analog, derivative, fusion protein or fragment thereof, that catalyzes cleavage of a thioester bond. A thioesterase activity includes, e.g., an association and/or dissociation constant, a catalytic rate and a substrate turnover rate. A thioesterase activity of a polypeptide may be the same as one of the thioesterase activities of DptH, the thioesterase domain of DptD, a polypeptide encoded by dptH, a polypeptide encoded by the thioesterase domain of dptD, a polypeptide having an amino acid sequence of the thioesterase domain of SEQ ID NO: 7 or a polypeptide having the amino acid sequence of SEQ ID NO: 8. The thioesterase activity may also different from that of one of the above-described thioesterases; e.g., it may have an increased or decreased catalytic activity, a different association and/or dissociation constant or a different substrate for catalysis. A “decreased” or “increased” thioesterase activity refers to a decreased or increased catalytic activity of the thioesterase, respectively.

[0057] A “thioesterase derived from a daptomycin biosynthetic gene cluster” is a thioesterase or thioesterase domain that is encoded by one of the genes of a gene cluster that encodes polypeptides involved in the synthesis of daptomycin. Preferably, the thioesterase is derived from a daptomycin biosynthetic gene cluster from Streptomyces, preferably from a daptomycin biosynthetic gene cluster from S. roseosporus.

[0058] A “daptomycin biosynthetic gene cluster” is defined herein as a nucleic acid molecule that encodes a number of polypeptides that are necessary for synthesis of daptomycin in an organism, preferably in a bacterial cell. A daptomycin biosynthetic gene cluster comprises a nucleic acid molecule that encodes at least DptA, DptBC, DptD and DptH, or that encode muteins, homologous proteins, allelic variants or fragments thereof, as well as other nucleic acid sequences that encode other polypeptides required for daptomycin synthesis. Preferably, a daptomycin biosynthetic gene cluster comprises that part of BAC B12:03A05 that permits the synthesis of daptomycin when the part is introduced and expressed in a bacterial cell.

[0059] A “daptomycin NRPS” is defined herein as an NRPS that is capable of synthesizing daptomycin in an appropriate bacterial cell. A daptomycin NRPS comprises polypeptide subunits DptA, DptBC and DptD, or muteins, homologous proteins, allelic variants or fragments thereof, that are capable, when expressed in an appropriate cell, of directing the synthesis of daptomycin. A daptomycin NRPS may further comprise DptH and/or other polypeptide, such as DptE or DptF. Preferably, the daptomycin NRPS is derived from the daptomycin biosynthetic gene cluster from Streptomyces, more preferably, the daptomycin NRPS is derived from S. roseosporus. The term “daptomycin NRPS” does not imply that the daptomycin NRPS can be used to synthesize only daptomycin. Rather, as used herein, the term is used solely for the purpose of describing that the NRPS was originally derived from a daptomycin biosynthetic gene cluster. The daptomycin NRPS may be used to synthesize molecules other than daptomycin, as described herein.

[0060] A “gene” is defined as a nucleic acid molecule that comprises a nucleic acid sequence that encodes a polypeptide and the expression control sequences that are operably linked to the nucleic acid sequence that encodes the polypeptide. For instance, a gene may comprise a promoter, one or more enhancers, a nucleic acid sequence that encodes a polypeptide, downstream regulatory sequences and, possibly, other nucleic acid sequences involved in regulation of the expression of an RNA.

[0061] A nucleic acid molecule or polypeptide is “derived” from a particular species if the nucleic acid molecule or polypeptide has been isolated from the particular species, or if the nucleic acid molecule or polypeptide is homologous to a nucleic acid molecule or polypeptide isolated from a particular species.

[0062] The terms “dptA”, “dptBC” and “dptD” refer to nucleic acid molecules that encode subunits of the daptomycin NRPS. In a preferred embodiment, the nucleic acid molecule is derived from Streptomyces, more preferably the nucleic acid molecule is derived from S. roseosporus. In a preferred embodiment, the dptA, dptBC and dptD encode the polypeptides having the amino acid sequences of SEQ ID NOS: 9, 11 and 7, respectively. The terms “dptA”, “dptBC” and “dptD” also refer to allelic variants of these genes, which may be obtained from other species of Streptomyces or from other S. roseosporus strains.

[0063] The term “dptH” refers to a gene whose coding domain encodes a thioesterase from a daptomycin biosynthetic gene cluster of S. roseosporus, wherein the naturally-occurring thioesterase is a “free” thioesterase. A free thioesterase is one that is not a functional domain of a larger polypeptide when it is naturally occurring. The dptH gene also encompasses the expression control sequences that are upstream of the coding region of the gene, as discussed below. In one embodiment, the expression control sequences of dptH have the nucleic acid sequence of SEQ ID NO: 5. The term “dptH” also refers to the nucleic acid encoding the polypeptide defined by SEQ ID NO: 8. The term “dptH” also refers to allelic variants of this gene, which may be obtained from other species of Streptomyces or from other S. roseosporus strains.

[0064] The term “allelic variant” refers to one of two or more alternative naturally-occurring forms of a gene, wherein each allele possesses a different nucleotide sequence. An allelic variant may encode the same polypeptide or a different one. As used herein, an allele is one that has at least 90% sequence identity, more preferably at least 95%, 96%, 97%, 98% or 99% sequence identity to the reference nucleic acid sequence, and encodes a polypeptide having similar or identical biological properties as the polypeptide encoded by the reference nucleic acid molecule.

[0065] The term “polynucleotide” or “nucleic acid molecule” refers to a polymeric form of nucleotides of at least 10 bases in length, either ribonucleotides or deoxynucleotides or a modified form of either type of nucleotide. The term includes single and double stranded forms of DNA. In addition, a polynucleotide may include either or both naturally-occurring and modified nucleotides linked together by naturally-occurring and/or non-naturally occurring nucleotide linkages.

[0066] An “isolated” or “substantially pure” nucleic acid or polynucleotide (e.g., an RNA, DNA or a mixed polymer) is one which is substantially separated from other cellular components that naturally accompany the native polynucleotide in its natural host cell, e.g., ribosomes, polymerases, or genomic sequences with which it is naturally associated. The term embraces a nucleic acid or polynucleotide that (1) has been removed from its naturally occurring environment, (2) is not associated with all or a portion of a polynucleotide in which the “isolated polynucleotide” is found in nature, (3) is operatively linked to a polynucleotide which it is not linked to in nature, or (4) does not occur in nature as part of a larger sequence. The term “isolated” or “substantially pure” also can be used in reference to recombinant or cloned DNA isolates, chemically synthesized polynucleotide analogs, or polynucleotide analogs that are biologically synthesized by heterologous systems.

[0067] A “part” of a nucleic acid molecule or polynucleotide refers to a nucleic acid molecule that comprises a partial contiguous sequence of at least 14 nucleotides of the reference nucleic acid molecule. Preferably, a part comprises at least 17 or 20 nucleotides of a reference nucleic acid molecule. More preferably, a part comprises at least 25, 30, 35, 40, 50, 60, 70, 80, 90, 100, 200, 300 400, 500 or 1000 nucleotides up to one nucleotide short of a reference nucleic acid molecule. A part of a nucleic acid molecule may comprise no other nucleic acid sequences. Alternatively, a part of a nucleic acid may comprise other nucleic acid sequences from other nucleic acid molecules.

[0068] The term “oligonucleotide” refers to a polynucleotide generally comprising a length of 200 nucleotides or fewer. Preferably, oligonucleotides are 10 to 60 nucleotides in length and most preferably 12, 13, 14, 15, 16, 17, 18, 19, 20, 30, 40, 50 or 60 nucleotides in length. Oligonucleotides may be single-stranded, e.g. for use as probes or primers, or may be double-stranded, e.g. for use in the construction of a mutant gene. Oligonucleotides of the invention can be either sense or antisense oligonucleotides. An oligonucleotide can include a label for detection, if desired.

[0069] The term “naturally-occurring nucleotide” referred to herein includes naturally-occurring deoxyribonucleotides and ribonucleotides. The term “modified nucleotides” referred to herein includes nucleotides with modified or substituted sugar groups and the like. The term “nucleotide linkages” referred to herein includes nucleotides linkages such as phosphorothioate, phosphorodithioate, phosphoroselenoate, phosphorodiselenoate, phosphoroanilothioate, phoshoraniladate, phosphoroamidate, and the like. See e.g., LaPlanche et al. Nucl. Acids Res. 14:9081 (1986); Stec et al. J. Am. Chem. Soc. 106:6077 (1984); Stein et al. Nucl. Acids Res. 16:3209 (1988); Zon et al. Anti-Cancer Drug Design 6:539 (1991); Zon et al. Oligonucleotides and Analogues: A Practical Approach, pp. 87-108 (F. Eckstein, Ed., Oxford University Press, Oxford England (1991)); Stec et al. U.S. Pat. No. 5,151,510; Uhlmann and Peyman Chemical Reviews 90:543 (1990), the disclosures of which are hereby incorporated by reference.

[0070] Unless specified otherwise, the left hand end of a polynucleotide sequence in sense orientation is the 5′ end and the right hand end of the sequence is the 3′ end. In addition, the left hand direction of a polynucleotide sequence in sense orientation is referred to as the 5′ direction, while the right hand direction of the polynucleotide sequence is referred to as the 3′ direction.

[0071] The term “percent sequence identity” or “identical” in the context of nucleic acid sequences refers to the residues in the two sequences which are the same when aligned for maximum correspondence. The length of sequence identity comparison may be over a stretch of at least about nine nucleotides, usually at least about 20 nucleotides, more usually at least about 24 nucleotides, typically at least about 28 nucleotides, more typically at least about 32 nucleotides, and preferably at least about 36 or more nucleotides. There are a number of different algorithms known in the art which can be used to measure nucleotide sequence identity. In one embodiment, polynucleotide sequences may be compared using Blast (Altschul et al., J. Mol. Biol. 215: 403-410, 1990). For instance, polynucleotide sequences can be compared using FASTA, Gap or Bestfit, which are programs in Wisconsin Package Version 10.0, Genetics Computer Group (GCG), Madison, Wis. FASTA provides alignments and percent sequence identity of the regions of the best overlap between the query and search sequences (Pearson, 1990, (herein incorporated by reference). For instance, percent sequence identity between nucleic acid sequences can be determined using FASTA with its default parameters (a word size of 6 and the NOPAM factor for the scoring matrix) or using Gap with its default parameters as provided in GCG Version 6.1, herein incorporated by reference.

[0072] The term “substantial homology” or “substantial similarity,” when referring to a nucleic acid or fragment thereof, indicates that, when optimally aligned with appropriate nucleotide insertions or deletions with another nucleic acid (or its complementary strand), there is nucleotide sequence identity in at least about 50%, more preferably 60% of the nucleotide bases, usually at least about 70%, more usually at least about 80%, preferably at least about 90%, and more preferably at least about 95%, 96%, 97%, 98% or 99% of the nucleotide bases, as measured by any well-known algorithm of sequence identity, such as FASTA, BLAST or Gap, as discussed above.

[0073] Alternatively, substantial homology or similarity exists when a nucleic acid or fragment thereof hybridizes to another nucleic acid, to a strand of another nucleic acid, or to the complementary strand thereof, under selective hybridization conditions. Typically, selective hybridization will occur when there is at least about 55% sequence identity—preferably at least about 65%, more preferably at least about 75%, and most preferably at least about 90%—over a stretch of at least about 14 nucleotides. See, e.g., Kanehisa, 1984, herein incorporated by reference.

[0074] Nucleic acid hybridization will be affected by such conditions as salt concentration, temperature, solvents, the base composition of the hybridizing species, length of the complementary regions, and the number of nucleotide base mismatches between the hybridizing nucleic acids, as will be readily appreciated by those skilled in the art. “Stringent hybridization conditions” and “stringent wash conditions” in the context of nucleic acid hybridization experiments depend upon a number of different physical parameters. The most important parameters include temperature of hybridization, base composition of the nucleic acids, salt concentration and length of the nucleic acid. One having ordinary skill in the art knows how to vary these parameters to achieve a particular stringency of hybridization.

[0075] In general, “stringent hybridization” is performed at about 25° C. below the thermal melting point (Tₘ) for the specific DNA hybrid under a particular set of conditions. “Stringent washing” is performed at temperatures about 5° C. lower than the Tₘ for the specific DNA hybrid under a particular set of conditions. The Tₘ is the temperature at which 50% of the target sequence hybridizes to a perfectly matched probe. See Sambrook et al., supra, page 9.51, hereby incorporated by reference.

[0076] The Tₘ for a particular DNA-DNA hybrid can be estimated by the formula:
Tₘ=81.5° C.+16.6 (log₁₀[Na⁺])+0.41 (fraction G+C)−0.63 (% formamide)−(600/1) where 1 is the length of the hybrid in base pairs.

[0077] The Tₘ for a particular RNA-RNA hybrid can be estimated by the formula:
Tₘ=79.8° C. +18.5 (log₁₀[Na⁺])+0.58 (fraction G+C)+11.8 (fraction G+C)²−0.35 (% formamide)−(820/1).

[0078] The Tₘ for a particular RNA-DNA hybrid can be estimated by the formula:
Tₘ=79.8° C.+18.5(log₁₀[Na⁺])+0.58 (fraction G+C)+11.8 (fraction G+C)² −0.50 (% formamide)−(820/1).

[0079] In general, the Tₘ decreases by 1-1.5° C. for each 1% of mismatch between two nucleic acid sequences. Thus, one having ordinary skill in the art can alter hybridization and/or washing conditions to obtain sequences that have higher or lower degrees of sequence identity to the target nucleic acid. For instance, to obtain hybridizing nucleic acids that contain up to 10% mismatch from the target nucleic acid sequence, 10-15° C. would be subtracted from the calculated Tₘ of a perfectly matched hybrid, and then the hybridization and washing temperatures adjusted accordingly. Probe sequences may also hybridize specifically to duplex DNA under certain conditions to form triplex or other higher order DNA complexes. The preparation of such probes and suitable hybridization conditions are well known in the art.

[0080] An example of stringent hybridization conditions for hybridization of complementary nucleic acid sequences having more than 100 complementary residues on a filter in a Southern or Northern blot or for screening a library is 50% formamide/6×SSC at 42° C. for at least ten hours, preferably 12-16 hours. Another example of stringent hybridization conditions is 6×SSC at 68° C. without formamide for at least ten hours, preferably 12-16 hours. An example of low stringency hybridization conditions for hybridization of complementary nucleic acid sequences having more than 100 complementary residues on a filter in a Southern or northern blot or for screening a library is 6×SSC at 42° C. for at least ten hours, preferably 12-16 hours. Hybridization conditions to identify nucleic acid sequences that are similar but not identical can be identified by experimentally changing the hybridization temperature from 68° C. to 42° C. while keeping the salt concentration constant (6×SSC), or keeping the hybridization temperature and salt concentration constant (e.g. 42° C. and 6×SSC) and varying the formamide concentration from 50% to 0%. Hybridization buffers may also include blocking agents to lower background. These agents are well-known in the art. See Sambrook et al., supra, pages 8.46 and 9.46-9.58, herein incorporated by reference.

[0081] Wash conditions also can be altered to change stringency conditions. An example of stringent wash conditions is a 0.2×SSC wash at 65° C. for 15 minutes (see Sambrook et al., supra, for SSC buffer). Often the high stringency wash is preceded by a low stringency wash to remove excess probe. An exemplary medium stringency wash for duplex DNA of more than 100 base pairs is 1×SSC at 45° C. for 15 minutes. An exemplary low stringency wash for such a duplex is 4×SSC at 40° C. for 15 minutes. In general, signal-to-noise ratio of 2× or higher than that observed for an unrelated probe in the particular hybridization assay indicates detection of a specific hybridization.

[0082] As defined herein, nucleic acids that do not hybridize to each other under stringent conditions are still substantially homologous to one another if they encode polypeptides that are substantially identical to each other. This occurs, for example, when a nucleic acid is created synthetically or recombinantly using a high codon degeneracy as permitted by the redundancy of the genetic code.

[0083] The polynucleotides of this invention may include both sense and antisense strands of RNA, cDNA, genomic DNA, and synthetic forms and mixed polymers of the above. They may be modified chemically or biochemically or may contain non-natural or derivatized nucleotide bases, as will be readily appreciated by those of skill in the art. Such modifications include, for example, labels, methylation, substitution of one or more of the naturally occurring nucleotides with an analog, internucleotide modifications such as uncharged linkages (e.g., methyl phosphonates, phosphotriesters, phosphoramidates, carbamates, etc.), charged linkages (e.g., phosphorothioates, phosphorodithioates, etc.), pendent moieties (e.g., polypeptides), intercalators (e.g., acridine, psoralen, etc.), chelators, alkylators, and modified linkages (e.g., alpha anomeric nucleic acids, etc.) Also included are synthetic molecules that mimic polynucleotides in their ability to bind to a designated sequence via hydrogen bonding and other chemical interactions. Such molecules are known in the art and include, for example, those in which peptide linkages substitute for phosphate linkages in the backbone of the molecule.

[0084] The term “mutated” when applied to nucleic acid sequences means that nucleotides in a nucleic acid sequence may be inserted, deleted or changed compared to a reference nucleic acid sequence. A single alteration may be made at a locus (a point mutation) or multiple nucleotides may be inserted, deleted or changed at a single locus. In addition, one or more alterations may be made at any number of loci within a nucleic acid sequence. In a preferred embodiment, the nucleic acid sequence is the wild type nucleic acid sequence for a thioesterase. The nucleic acid sequence may be mutated by any method known in the art including those mutagenesis techniques described infra.

[0085] The term “error-prone PCR” refers to a process for performing PCR under conditions where the copying fidelity of the DNA polymerase is low, such that a high rate of point mutations is obtained along the entire length of the PCR product. See, e.g., Leung et al., Technique, 1, pp. 11-15 (1989) and Caldwell and Joyce PCR Methods Applic., 2, pp. 28-33 (1992).

[0086] The term “oligonucleotide-directed mutagenesis” refers to a process which enables the generation of site-specific mutations in any cloned DNA segment of interest. See, e.g., Reidhaar-Olson et al., Science, 241, pp. 53-57 (1988).

[0087] The term “assembly PCR” refers to a process which involves the assembly of a PCR product from a mixture of small DNA fragments. A large number of different PCR reactions occur in parallel in the same vial, with the products of one reaction priming the products of another reaction.

[0088] The term “sexual PCR mutagenesis” or “DNA shuffling” refers to a method of error-prone PCR coupled with forced homologous recombination between DNA molecules of different but highly related DNA sequence in vitro, caused by random fragmentation of the DNA molecule based on sequence homology, followed by fixation of the crossover by primer extension in an error-prone PCR reaction. See, e.g., Stemmer, Proc. Natl. Acad. Sci. U.S.A., 91, pp. 10747-10751 (1994). DNA shuffling can be carried out between several related genes (“Family shuffling”).

[0089] The term “in vivo mutagenesis” refers to a process of generating random mutations in any cloned DNA of interest which involves the propagation of the DNA in a strain of bacteria such as E. coli that carries mutations in one or more of the DNA repair pathways. These “mutator” strains have a higher random mutation rate than that of a wild-type parent. Propagating the DNA in a mutator strain will eventually generate random mutations within the DNA.

[0090] The term “cassette mutagenesis” refers to any process for replacing a small region of a double-stranded DNA molecule with a synthetic oligonucleotide “cassette” that differs from the native sequence. The oligonucleotide often contains completely and/or partially randomized native sequence.

[0091] The term “recursive ensemble mutagenesis” refers to an algorithm for protein engineering (protein mutagenesis) developed to produce diverse populations of phenotypically related mutants whose members differ in amino acid sequence. This method uses a feedback mechanism to control successive rounds of combinatorial cassette mutagenesis. See, e.g., Arkin and Youvan, Proc. Natl. Acad. Sci. U.S.A., 89, pp. 7811-7815 (1992).

[0092] The term “exponential ensemble mutagenesis” refers to a process for generating combinatorial libraries with a high percentage of unique and functional mutants, wherein small groups of residues are randomized in parallel to identify, at each altered position, amino acids which lead to functional proteins. See, e.g., Delegrave and Youvan, Biotechnol. Res., 11, pp. 1548-1552 (1993); and random and site-directed mutagenesis, Arnold, Curr. Opin. Biotechnol., 4, pp. 450-455 (1993). Each of the references mentioned above are hereby incorporated by reference in its entirety.

[0093] “Operatively linked” expression control sequences refers to a linkage in which the expression control sequence is contiguous with the gene of interest to control the gene of interest, as well as expression control sequences that act in trans or at a distance to control the gene of interest.

[0094] The term “expression control sequence” as used herein refers to polynucleotide sequences which are necessary to affect the expression of coding sequences to which they are operatively linked. Expression control sequences are sequences which control the transcription, post-transcriptional events and translation of nucleic acid sequences. Expression control sequences include appropriate transcription initiation, termination, promoter and enhancer sequences; efficient RNA processing signals such as splicing and polyadenylation signals; sequences that stabilize cytoplasmic mRNA; sequences that enhance translation efficiency (e.g., ribosome binding sites); sequences that enhance protein stability; and when desired, sequences that enhance protein secretion. The nature of such control sequences differs depending upon the host organism; in prokaryotes, such control sequences generally include promoter, ribosomal binding site, and transcription termination sequence. The term “control sequences” is intended to include, at a minimum, all components whose presence is essential for expression, and can also include additional components whose presence is advantageous, for example, leader sequences and fusion partner sequences.

[0095] The term “vector,” as used herein, is intended to refer to a nucleic acid molecule capable of transporting another nucleic acid to which it has been linked. One type of vector is a “plasmid”, which refers to a circular double stranded DNA loop into which additional DNA segments may be ligated. Other vectors include cosmids, bacterial artificial chromosomes (BAC) and yeast artificial chromosomes (YAC). Another type of vector is a viral vector, wherein additional DNA segments may be ligated into the viral genome. Viral vectors that infect bacterial cells are referred to as bacteriophages. Certain vectors are capable of autonomous replication in a host cell into which they are introduced (e.g., bacterial vectors having a bacterial origin of replication). Other vectors can be integrated into the genome of a host cell upon introduction into the host cell, and thereby are replicated along with the host genome. Moreover, certain vectors are capable of directing the expression of genes to which they are operatively linked. Such vectors are referred to herein as “recombinant expression vectors” (or simply, “expression vectors”). In general, expression vectors of utility in recombinant DNA techniques are often in the form of plasmids. In the present specification, “plasmid” and “vector” may be used interchangeably as the plasmid is the most commonly used form of vector. However, the invention is intended to include other forms of expression vectors that serve equivalent functions.

[0096] The term “recombinant host cell” (or simply “host cell”), as used herein, is intended to refer to a cell into which a recombinant expression vector has been introduced. It should be understood that such terms are intended to refer not only to the particular subject cell but to the progeny of such a cell. Because certain modifications may occur in succeeding generations due to either mutation or environmental influences, such progeny may not, in fact, be identical to the parent cell, but are still included within the scope of the term “host cell” as used herein.

[0097] The term “polypeptide” encompasses both naturally-occurring and non-naturally-occurring proteins and polypeptides, polypeptide fragments and polypeptide mutants, derivatives and analogs. As used herein, a polypeptide comprises at least six amino acids, preferably at least 8, 10, 12, 15, 20, 25 or 30 amino acids, and more preferably the polypeptide is the full length of the naturally-occurring polypeptide. A polypeptide may be monomeric or polymeric. Further, a polypeptide may comprise a number of different modules within a single polypeptide each of which has one or more distinct activities. A preferred polypeptide in accordance with the invention comprises a thioesterase derived from the daptomycin biosynthetic gene cluster, as well as a fragment, mutant, analog and derivative thereof.

[0098] The term “isolated protein” or “isolated polypeptide” is a protein or polypeptide that by virtue of its origin or source of derivation (1) is not associated with naturally associated components that accompany it in its native state, (2) is free of other proteins from the same species (3) is expressed by a cell from a different species, or (4) does not occur in nature. Thus, a polypeptide that is chemically synthesized or synthesized in a cellular system different from the cell from which it naturally originates will be “isolated” from its naturally associated components. A polypeptide or protein may also be rendered substantially free of naturally associated components by isolation, using protein purification techniques well known in the art.

[0099] A protein or polypeptide is “substantially pure,” “substantially homogeneous” or “substantially purified” when at least about 60% to 75% of a sample exhibits a single species of polypeptide. The polypeptide or protein may be monomeric or multimeric. A substantially pure polypeptide or protein will typically comprise about 50%, 60%, 70%, 80% or 90% W/W of a protein sample, more usually about 95%, and preferably will be over 99% pure. Protein purity or homogeneity may be indicated by a number of means well known in the art, such as polyacrylamide gel electrophoresis of a protein sample, followed by visualizing a single polypeptide band upon staining the gel with a stain well known in the art. For certain purposes, higher resolution may be provided by using HPLC or other means well known in the art for purification.

[0100] The term “polypeptide fragment” as used herein refers to a polypeptide that has an amino-terminal and/or carboxy-terminal deletion compared to a full-length polypeptide. In a preferred embodiment, the polypeptide fragment is a contiguous sequence in which the amino acid sequence of the fragment is identical to the corresponding positions in the naturally-occurring sequence. Fragments typically are at least 6, 7, 8, 9 or 10 amino acids long, preferably at least 12, 14, 16 or 18 amino acids long, more preferably at least 20 amino acids long, more preferably at least 25, 30, 35, 40 or 45, amino acids, even more preferably at least 50 or 60 amino acids long, and even more preferably at least 70 amino acids long.

[0101] A “derivative” refers to polypeptides or fragments thereof that are substantially homologous in primary structural sequence but which include, e.g., in vivo or in vitro chemical and biochemical modifications or which incorporate amino acids that are not found in the native polypeptide. Such modifications include, for example, acetylation, carboxylation, phosphorylation, glycosylation, ubiquitination, labeling, e.g., with radionuclides, and various enzymatic modifications, as will be readily appreciated by those well skilled in the art. A variety of methods for labeling polypeptides and of substituents or labels useful for such purposes are well known in the art, and include radioactive isotopes such as ¹²⁵I, ^{32 P,} ³⁵S, and ³H, ligands which bind to labeled antiligands (e.g., antibodies), fluorophores, chemiluminescent agents, enzymes, and antiligands which can serve as specific binding pair members for a labeled ligand. The choice of label depends on the sensitivity required, ease of conjugation with the primer, stability requirements, and available instrumentation. Methods for labeling polypeptides are well known in the art. See Ausubel et al., 1992, hereby incorporated by reference.

[0102] The term “fusion protein” refers to polypeptides comprising polypeptides or fragments coupled to heterologous amino acid sequences. Fusion proteins are useful because they can be constructed to contain two or more desired functional elements from two or more different proteins. A fusion protein comprises at least 10 contiguous amino acids from a polypeptide of interest, more preferably at least 20 or 30 amino acids, even more preferably at least 40, 50 or 60 amino acids, yet more preferably at least 75, 100 or 125 amino acids. Fusion proteins can be produced recombinantly by constructing a nucleic acid sequence which encodes the polypeptide or a fragment thereof in frame with a nucleic acid sequence encoding a different protein or peptide and then expressing the fusion protein. Alternatively, a fusion protein can be produced chemically by crosslinking the polypeptide or a fragment thereof to another protein.

[0103] The term “non-peptide analog” refers to a compound with properties that are analogous to those of a reference polypeptide. A non-peptide compound may also be termed a “peptide mimetic” or a “peptidomimetic.” See, e.g., Fauchere, J. Adv. Drug Res. 15:29 (1986); Veber and Freidinger Trends Neurosci. p. 392 (1985); and Evans et al. J. Med. Chem. 30:1229 (1987), which are incorporated herein by reference. Such compounds are often developed with the aid of computerized molecular modeling. Peptide mimetics that are structurally similar to useful peptides may be used to produce an equivalent effect. Generally, peptidomimetics are structurally similar to a paradigm polypeptide (i.e., a polypeptide that has a desired biochemical property or pharmacological activity), such as a thioesterase, but have one or more peptide linkages optionally replaced by a linkage selected from the group consisting of: —CH₂NH—, —CH₂S—, —CH₂—CH₂—, —CH═CH— (cis and trans), —COCH₂—, —CH (OH) CH₂—, and —CH₂SO—, by methods well known in the art. Systematic substitution of one or more amino acids of a consensus sequence with a D-amino acid of the same type (e.g., D-lysine in place of L-lysine) may also be used to generate more stable peptides. In addition, constrained peptides comprising a consensus sequence or a substantially identical consensus sequence variation may be generated by methods known in the art (Rizo and Gierasch, Annu. Rev. Biochem. 61:387 (1992), incorporated herein by reference); for example, by adding internal cysteine residues capable of forming intramolecular disulfide bridges which cyclize the peptide.

[0104] A “polypeptide mutant” or “mutein” refers to a polypeptide whose sequence contains substitutions, insertions or deletions of one or more amino acids compared to the amino acid sequence of a native or wild type protein. A mutein may have one or more amino acid point substitutions, in which a single amino acid at a position has been changed to another amino acid, one or more insertions and/or deletions, in which one or more amino acids are inserted or deleted, respectively, in the sequence of the naturally-occurring protein, and/or truncations of the amino acid sequence at either or both the amino or carboxy termini. Further, a mutein may have the same or different biological activity as the naturally-occurring protein. For instance, a mutein may have an increased or decreased biological activity. In a preferred embodiment of the present invention, a mutein has the same or increased thioesterase activity as a naturally-occurring thioesterase. A mutein has at least 50%, 60% or 70% sequence homology to the wild type protein, more preferred are muteins having at least 80%, 85% or 90% sequence homology to the wild type protein, even more preferred are muteins exhibiting at least 95%, 96%, 97%, 98% or 99% sequence identity. Sequence homology may be measured by any common sequence analysis algorithm, such as Gap or Bestfit, using default parameters.

[0105] Preferred amino acid substitutions are those which: (1) reduce susceptibility to proteolysis, (2) reduce susceptibility to oxidation, (3) alter binding affinity for forming protein complexes, (4) alter binding affinity or enzymatic activity, and (5) confer or modify other physicochemical or functional properties of such derivatives, analogs, fusion proteins and muteins. Single or multiple amino acid substitutions (preferably conservative amino acid substitutions) may be made in the naturally-occurring sequence (preferably in the portion of the polypeptide outside the domain(s) forming intermolecular contacts. A conservative amino acid substitution should not substantially change the structural characteristics of the parent sequence (e.g., a replacement amino acid should not tend to break a helix that occurs in the parent sequence, or disrupt other types of secondary structure that characterizes the parent sequence). Examples of art-recognized polypeptide secondary and tertiary structures are described in Proteins, Structures and Molecular Principles (Creighton, Ed., W. H. Freeman and Company, New York (1984)); Introduction to Protein Structure (C. Branden and J. Tooze, eds., Garland Publishing, New York, N.Y. (1991)); and Thornton et al. Nature 354:105 (1991), which are each incorporated herein by reference.

[0106] As used herein, the twenty conventional amino acids and their abbreviations follow conventional usage. See Immunology—A Synthesis (2^{nd} Edition, E. S. Golub and D. R. Gren, Eds., Sinauer Associates, Sunderland, Mass. (1991)), which is incorporated herein by reference. Stereoisomers (e.g., D-amino acids) of the twenty conventional amino acids, unnatural amino acids such as α-, α-disubstituted amino acids, N-alkyl amino acids, and other unconventional amino acids may also be suitable components for polypeptides of the present invention. Examples of unconventional amino acids include: γ-carboxyglutamate, ε-N,N,N-trimethyllysine, ε-N-acetyllysine, O-phosphoserine, N-acetylserine, N-formylmethionine, 3-methylhistidine, 5-hydroxylysine, s-N-methylarginine, and other similar amino acids and imino acids (e.g., 4-hydroxyproline). In the polypeptide notation used herein, the lefthand direction is the amino terminal direction and the right hand direction is the carboxy-terminal direction, in accordance with standard usage and convention.

[0107] A protein has “homology” or is “homologous” to a protein from another organism if the encoded amino acid sequence of the protein has a similar sequence to the encoded amino acid sequence of a protein of a different organism. Alternatively, a protein may have homology or be homologous to another protein if the two proteins have similar amino acid sequences. Although two proteins are said to be “homologous,” this does not imply that there is necessarily an evolutionary relationship between the proteins. Instead, the term “homologous” is defined to mean that the two proteins have similar amino acid sequences. In a preferred embodiment, a homologous protein is one that exhibits at least 50%, 60% or 70% sequence identity to the wild type protein, preferred are homologous proteins that exhibit at least 80%, 85%, 90%, 95%, 96%, 97%, 98% or 99% sequence identity. In addition, although in many cases proteins with similar amino acid sequences will have similar functions, the term “homologous” does not imply that the proteins must be functionally similar to each other.

[0108] When “homologous” is used in reference to proteins or peptides, it is recognized that residue positions that are not identical often differ by conservative amino acid substitutions. A “conservative amino acid substitution” is one in which an amino acid residue is substituted by another amino acid residue having a side chain (R group) with similar chemical properties (e.g., charge or hydrophobicity). In general, a conservative amino acid substitution will not substantially change the functional properties of a protein. In cases where two or more amino acid sequences differ from each other by conservative substitutions, the percent sequence identity or degree of homology may be adjusted upwards to correct for the conservative nature of the substitution. Means for making this adjustment are well known to those of skill in the art (see, e.g., Pearson et al., 1994, herein incorporated by reference).

[0109] The following six groups each contain amino acids that are conservative substitutions for one another:
[0110] 1. Serine (S), Threonine (T);
[0111] 2. Aspartic Acid (D), Glutamic Acid (E);
[0112] 3. Asparagine (N), Glutamine (Q);
[0113] 4. Arginine (R), Lysine (K);
[0114] 5. Isoleucine (I), Leucine (L), Methionine (M), Alanine (A), Valine (V), and
[0115] 6. Phenylalanine (F), Tyrosine (Y), Tryptophan (W).

[0116] Sequence homology for polypeptides, which is also referred to as sequence identity, is typically measured using sequence analysis software. See, e.g., the Sequence Analysis Software Package of the Genetics Computer Group (GCG), University of Wisconsin Biotechnology Center, 910 University Avenue, Madison, Wis. 53705. Protein analysis software matches similar sequences using measure of homology assigned to various substitutions, deletions and other modifications, including conservative amino acid substitutions. For instance, GCG contains programs such as “Gap” and “Bestfit” which can be used with default parameters to determine sequence homology or sequence identity between closely related polypeptides, such as homologous polypeptides from different species of organisms or between a wild type protein and a mutein thereof. See, e.g., GCG Version 6.1.

[0117] A preferred algorithm when comparing a polypeptide sequence to a database containing a large number of sequences from different organisms is the computer program BLAST, especially blastp, tblastn or BlastX. See Altschul et al. Nucleic Acids Res. 25:3389-3402 (1997), herein incorporated by reference. BlastX, which compares a translated nucleotide sequence to a protein database, may be performed online through the servers located at the National Center for Biotechnology Information. Preferred parameters for blastp, which compares a protein sequence to a protein database are:
[0118] Expectation value: 10 (default)
[0119] Filter: seg (default)
[0120] Cost to open a gap: 11 (default)
[0121] Cost to extend a gap: 1 (default
[0122] Max. alignments: 100 (default)
[0123] Word size: 11 (default)
[0124] No. of descriptions: 100 (default)
[0125] Penalty Matrix: BLOSUM62

[0126] The length of polypeptide sequences compared for homology will generally be at least about 16 amino acid residues, usually at least about 20 residues, more usually at least about 24 residues, typically at least about 28 residues, and preferably more than about 35 residues. When searching a database containing sequences from a large number of different organisms, it is preferable to compare amino acid sequences.

[0127] Database searching using amino acid sequences can be measured by algorithms other than blastp known in the art. For instance, polypeptide sequences can be compared using FASTA, a program in GCG Version 6.1. FASTA provides alignments and percent sequence identity of the regions of the best overlap between the query and search sequences (Pearson, 1990, herein incorporated by reference). For example, percent sequence identity between amino acid sequences can be determined using FASTA with its default parameters (a word size of 2 and the PAM250 scoring matrix), as provided in GCG Version 6.1, herein incorporated by reference.

[0128] An “antibody” refers to an intact immunoglobulin, or to an antigen-binding portion thereof that competes with the intact antibody for antigen-specific binding. Antigen-binding portions may be produced by recombinant DNA techniques or by enzymatic or chemical cleavage of intact antibodies. Antigen-binding portions include, inter alia, Fab, Fab′, F(ab′) ₂, Fv, dAb, and complementarity determining region (CDR) fragments, single-chain antibodies (scFv), chimeric antibodies, diabodies and polypeptides that contain at least a portion of an immunoglobulin that is sufficient to confer specific antigen binding to the polypeptide. An Fab fragment is a monovalent fragment consisting of the VL, VH, CL and CH1 domains; a F(ab′)₂ fragment is a bivalent fragment comprising two Fab fragments linked by a disulfide bridge at the hinge region; a Fd fragment consists of the VH and CH1 domains; an Fv fragment consists of the VL and VH domains of a single arm of an antibody; and a dAb fragment (Ward et al., Nature 341:544-546, 1989) consists of a VH domain.

[0129] A single-chain antibody (scFv) is an antibody in which a VL and VH regions are paired to form a monovalent molecules via a synthetic linker that enables them to be made as a single protein chain (Bird et al., Science 242:423-426, 1988 and Huston et al., Proc. Natl. Acad. Sci. USA 85:5879-5883, 1988). Diabodies are bivalent, bispecific antibodies in which VH and VL domains are expressed on a single polypeptide chain, but using a linker that is too short to allow for pairing between the two domains on the same chain, thereby forcing the domains to pair with complementary domains of another chain and creating two antigen binding sites (see e.g., Holliger et al., Proc. Natl. Acad. Sci. USA 90:6444-6448, 1993, and Poljak et al., Structure 2:1121-1123, 1994). One or more CDRs may be incorporated into a molecule either covalently or noncovalently to make it an immunoadhesin. An immunoadhesin may incorporate the CDR(s) as part of a larger polypeptide chain, may covalently link the CDR(s) to another polypeptide chain, or may incorporate the CDR(s) noncovalently. The CDRs permit the immunoadhesin to specifically bind to a particular antigen of interest. A chimeric antibody is an antibody that contains one or more regions from one antibody and one or more regions from one or more other antibodies.

[0130] An antibody may have one or more binding sites. If there is more than one binding site, the binding sites may be identical to one another or may be different. For instance, a naturally-occurring immunoglobulin has two identical binding sites, a single-chain antibody or Fab fragment has one binding site, while a “bispecific” or “bifunctional” antibody has two different binding sites.

[0131] An “isolated antibody” is an antibody that (1) is not associated with naturally-associated components, including other naturally-associated antibodies, that accompany it in its native state, (2) is free of other proteins from the same species, (3) is expressed by a cell from a different species, or (4) does not occur in nature.

[0132] A “neutralizing antibody” or “an inhibitory antibody” is an antibody that inhibits the activity of a polypeptide or blocks the binding of a polypeptide to a ligand that normally binds to it. For example, a neutralizing anti-thioesterase antibody may be one that blocks the activity of the thioesterase. An “activating antibody” is an antibody that increases the activity of a polypeptide. For example, an activating anti-thioesterase antibody is one that increases the activity of a thioesterase.

[0133] The term “epitope” includes any protein determinant capable of specific binding to an immunoglobulin or T-cell receptor. Epitopic determinants usually consist of chemically active surface groupings of molecules such as amino acids or sugar side chains and usually have specific three dimensional structural characteristics, as well as specific charge characteristics. An antibody is said to specifically bind an antigen when the dissociation constant is ≦1 μM, preferably ≦100 nM and most preferably ≦10 nM.

[0134] The term patient includes human and veterinary subjects.

[0135] Throughout this specification and claims, the word “comprise,” or variations such as “comprises” or “comprising,” will be understood to imply the inclusion of a stated integer or group of integers but not the exclusion of any other integer or group of integers.

[0136] Nucleic Acid Molecules, Regulatory Sequences, Vectors, Host Cells and Recombinant Methods of Making Polypeptides

[0137] Nucleic Acid Molecules

[0138] In one aspect, the present invention provides a nucleic acid molecule encoding a thioesterase or a daptomycin NRPS or a subunit thereof. In one embodiment, the nucleic acid molecule encodes one or more of DptA, DptBC or DptD. In a preferred embodiment, the nucleic acid molecules encodes a polypeptide comprising any one of the amino acid sequences of SEQ ID NOS: 9, 11 or 7. In another preferred embodiment, the nucleic acid molecule comprises dptA, dptBC and/or dptD. In a further preferred embodiment, the nucleic acid molecule comprises a nucleic acid sequence comprising any one of SEQ ID NOS: 10, 12 or 3.

[0139] In another embodiment, the nucleic acid molecule encodes a thioesterase that is derived from a daptomycin biosynthetic gene cluster. In a preferred embodiment, the nucleic acid molecule encodes a thioesterase derived from a daptomycin biosynthetic gene cluster that is a free thioesterase or is an integral thioesterase. In another preferred embodiment, the nucleic acid molecule encodes DptH or the thioesterase domain of DptD. In a more preferred embodiment, the nucleic acid molecule encodes a polypeptide comprising an amino acid sequence of the thioesterase domain of SEQ ID NO: 7 or has the amino acid sequence of SEQ ID NO: 8. In another embodiment, the nucleic acid molecule comprises the thioesterase-encoding domain of dptD or dptH from the daptomycin biosynthetic gene cluster. In another preferred embodiment, the nucleic acid molecule comprises a nucleic acid sequence of SEQ ID NO: 6 or of SEQ ID NO: 3, or the region comprising the thioesterase-encoding portion thereof. In another embodiment, the nucleic acid molecule also encodes a daptomycin NRPS or a subunit thereof. See Examples 1-6 regarding the isolation and identification of dptA, dptBC, dptD and dptH and other genes of the daptomycin biosynthetic gene cluster.

[0140] In another embodiment, the nucleic acid molecule encodes an acyl CoA ligase. In a preferred embodiment, the nucleic acid molecule encodes DptE, preferably a nucleic acid molecule encoding SEQ ID NO: 15. In a more preferred embodiment, the nucleic acid molecule comprises dptE. In an even more preferred embodiment, the nucleic acid molecule comprises SEQ ID NO: 16. In another embodiment, the nucleic acid molecule encodes an acyl transferase. In a preferred embodiment, the nucleic acid molecule encodes DptF, preferably a nucleic acid molecule encoding SEQ ID NO: 17. In a more preferred embodiment, the nucleic acid molecule comprises dptF. In an even more preferred embodiment, the nucleic acid molecule comprises SEQ ID NO: 18.

[0141] Another embodiment of the invention provides a nucleic acid molecule comprising a DNA sequence from a bacterial artificial chromosome (BAC) comprising nucleic acid sequences from S. roseosporus. In a preferred embodiment, the nucleic acid molecule comprises a S. roseosporus nucleic acid sequence from any one of BAC clones B12:01G05, B12:06A12, B12:12F06, B12:18H04, B12:20C09 or B12:03A05. In a preferred embodiment, the nucleic acid molecule comprises a S. roseosporus nucleic acid sequence from B12:03A05 (ATCC Deposit PTA-3140, deposited Mar. 1, 2001). The nucleic acid molecule may comprise the entire S. roseosporus nucleic acid sequence in the BAC clone or may comprise a part thereof. In a preferred embodiment, the part is a nucleic acid molecule that comprises at least one nucleic acid sequence that can encode a polypeptide, preferably a full-length polypeptide, i.e., a nucleic acid molecule that encodes a polypeptide from its start codon to its stop codon. In one preferred embodiment, the part comprises a nucleic acid molecule encoding a polypeptide involved in daptomycin biosynthesis, such as, without limitation, dptA, dptBC, dptD, dptE, dptF or dptH.

[0142] In another embodiment, a part from the BAC clone is a nucleic acid molecule comprising a nucleic acid sequence encoding a polypeptide selected from SEQ ID NOS: 19, 21, 23, 25, 27, 29, 31, 33, 35, 37, 39, 41, 43, 45, 47, 49, 51, 53, 55, 57, 59, 61, 63, 65, 67, 69, 71, 73, 75, 77, 79, 81, 83, 85, 87, 89, 91, 93, 95, 97, 99, 101, 104, 108, 110, 112, 114, 116, 118, 120, 122, 124, 126, 128, 130, 132, 134 or 136. In another embodiment, the part from the BAC clone is a nucleic acid molecule comprising a nucleic acid sequence selected from SEQ ID NOS: 20, 22, 24, 26, 28, 30, 32, 34, 36, 38, 40, 42, 44, 46, 48, 50, 52, 54, 56, 58, 60, 62, 64, 66, 68, 70, 72, 74, 76, 78, 80, 82, 84, 86, 88, 90, 92, 94, 96, 98, 100, 102, 105, 107, 109, 111, 113, 115, 117, 119, 121, 123, 125, 127, 129, 131, 133 or 135.

[0143] The polypeptides having the amino acid sequences of SEQ ID NOS: 110 and 112 are regulators of daptomycin biosynthesis. Multiple regulators are needed for the function of biosynthetic pathways in Streptomyces (Bate et al. Chem. Biol., 6, 617-624, 1999; Baltz, Bioprocess Technol. 22, 308-381, 1995). For example, the biosynthetic pathway for bialaphos in S. hygroscopicus contains a gene, bprA, which has a positive regulatory role in antibiotic production (Raibaud et al., J. Bacteriol. 173, 4454-4463, 1991). It has also been shown that increases of antibiotic production can be acheived by increasing copy number of positive regulator genes in a variety of producing strains (e.g. S. lividans, Vogtli et al., Mol. Microbiol. 14, 643-653, 1994; in S. argillaceus, Lombo et al., J. Bacteriol. 181, 642-647, 1999 and in S. peucetius, Otten et al., Microbiology 146, 1457-1468, 2000). The regulatory activator polypeptide of SEQ ID NO: 110, which is encoded by the nucleic acid molecule having the nucleotide sequence of SEQ ID NO: 109, shares identities and similarities not only with brpA and with other regulatory proteins found in streptomyces but also with the luxR-family proteins involved in quorum sensing. All of these are DNA-binding proteins in the family of two-component transcriptional activators (Kenney, Curr. Opin. Microbiol. 5, 135-141, 2002). Thus, the regulatory activator polypeptide of SEQ ID NO: 110 can be used to augment the yield of daptomycin in S. roseosporus. The regulatory activator gene or a biologically active portion thereof can be cloned into an integrative or autonomously replicating expression vector and reintroduced into one or more neutral sites in one or more copies in S. roseosporus. The transgenic strain may be fermented and analyzed for daptomycin production as described in Example 9 and could be used to produce a larger amount of daptomycin that the wildtype strain.

[0144] The polypeptide having the amino acid sequence of SEQ ID NO: 112, which is encoded by the nucleotide sequence of SEQ ID NO: 111, shares significant amounts of identities and similarities with a putative DeoR-family transcriptional regulator from Streptomyces coelicolor as well as a variety of catabolite repressors (LacI, rbsR, malR, REG1). These proteins bind to the promoter regions to prevent the transcription (Zeng and Saxild, J. Bacteriol. 181, 1719-1729, 1999; Oskouian and Stewart, J. Bacteriol. 172, 3804-3812, 1990). Thus, this gene is a negative regulator of daptomycin biosynthesis. Therefore, disruption or deletion of this negative regulator gene or inhibition of its protein product should lead to constitutive expression of daptomycin and/or enhanced yield. In another embodiment, one may delete the negative regulatory gene and insert multiple copies of the positive regulatory gene to increase daptomycin production even more.

[0145] The polypeptides having amino acids sequences of SEQ ID NOS: 19, 21, 29, 45, 47, 49, 63, 67, 75 and 77 (nucleic acid sequences of SEQ ID NOS: 20, 22, 30, 46, 48, 50, 64, 68, 76 or 78) are ABC transporters. Some of the polypeptides are pump-like polypeptides with Walker motifs while others are polypeptides that have a role in metal scavenging, e.g., iron or manganese transport (see Tables 6 and 7). The nucleic acid molecule comprising SEQ ID NO: 76 encodes an ATP-binding component of an ABC transporter system, as determined by its sequence similarity to ORF1 of (AAD44229.1) of S. rochei and the S. peucetius DrrA (P32010) genes. The encoded polypeptide has both a Walker A and a Walker B motif. Further, its synthesis appears to be translationally coupled to that of a nucleic acid molecule comprising SEQ ID NO: 78, which encodes a DrrB-like polypeptide, as determined by its sequence similar to the S. peuticeus DrrB product (AAA74718.1), encoding the integral membrane component. The polypeptide having an amino acid sequence of SEQ ID NO: 21 is a StrV homolog, while the polypeptide having an amino acid sequence of SEQ ID NO: 19 is a StrW homolog. See, e.g., Beyer et al., 1996, supra. The StrV homolog has both Walker motifs, while the StrW homolog has only a Walker B motif. Both nucleic acid sequences encoding the polypeptide are on the complementary strand and appear to be translationally regulated. They have S. coelicolor homologs, G8A.01 and G8A.02 (emb| CAB88931, CAB88932). See Tables 6 and 7.

[0146] In another aspect, a part of the BAC clone is a nucleic acid molecule comprising a nucleic acid sequence encoding an oxidoreductase; a dehydrogenase; a transcriptional regulator involved in antibiotic resistance; NovABC-related polypeptides, which are involved in the biosynthesis of novobiocin, an antimicrobial agent; a monooxygenase; an acyl CoA thioesterase; a DNA helicase; a DNA ligase; a hydrolase; a thermostable neutral protease; ABC transporters that may be useful in the transport of daptomycin; a spo VK-like protein involved in endospore formation; a serine protease; and an FtsK/SpoIIIE-like protein involved in DNA segregation during septation and spore formation. These nucleic acid molecules and encoded polypeptides may be useful in daptomycin biosynthesis; e.g., the acyl CoA thioesterase may be useful for the reasons provided above for thioesterases and may also be important in the addition of the lipid tail to the peptide domain of daptomycin. These nucleic acid molecules encoding enzymes are also useful because they may be used in the same way as other oxidoreductases, dehydrogenases, monooxygenases, hydrolases, serine or neutral proteases, DNA helicases or DNA ligases are used in the art. Notably, the transcriptional regulator can be mutated using well-known methods to increase or decrease daptomycin or other antibiotic resistance. The nucleic acid molecules encoding NovABC-related polypeptides may be used in the same way as NovABC is used in the art, e.g., to produce novobiocin or related antimicrobial agents. The polypeptides having the above-described activity comprise the amino acid sequences of SEQ ID NOS: 23, 25, 27, 29, 33, 35, 37, 91, 93, 97, 99, 104, 108, 114, 116, 118, 120, 130, 132, 134 and 136 and are encoded by nucleic acid sequences of SEQ ID NOS: 24, 26, 28, 30, 34, 36, 38, 92, 94, 98, 100, 105, 107, 113, 115, 117, 119, 129, 131, 133 and 135.

[0147] In another aspect, a part of the BAC clone is a nucleic acid molecule that encodes a polypeptide that does not have a defined function but which is highly homologous to nucleic acid molecules and polypeptides from other Streptomyces. These nucleic acid molecules (SEQ ID NOS: 62, 66, 70, 80, 82, 84, 86, 88, 96, 102, 121, 123, 125 and 127), the polypeptides they encode (SEQ ID NOS: 61, 65, 69, 79, 81, 83, 85, 87, 95, 101, 122, 124, 126 and 128) and antibodies to the polypeptides may be used to identify other Streptomyces species using standard molecular biological and protein chemistry techniques (e.g., PCR, RT-PCR, Southern blotting, northern blotting, ELISAs, radioimmunoassays or western blotting), which is useful, e.g., in microbiological testing or forensics. In another embodiment, a part of the BAC clone is a nucleic acid molecule that encodes a polypeptide that does not have a defined function and is not highly homologous to a nucleic acid molecule or polypeptide from another species. These nucleic acid molecules (SEQ ID NOS: 32, 40, 42, 44, 52, 54, 56, 58, 60, 72 and 74) are nevertheless useful because they are close to the daptomycin biosynthetic gene cluster, and as such, they can be used to identify nucleic acid molecules that encode all or a part of the daptomycin biosynthetic gene cluster. Parts of the BAC clone that do not encode a polypeptide are useful for the same reasons. Further, the polypeptides having the amino acid sequence of SEQ ID NOS: 31, 39, 41, 43, 51, 53, 55, 57, 59, 71 and 73 can be used to make antibodies that can be used to identify S. roseosporus. Because the polypeptides are not highly homologous to any other species, the antibodies would likely be highly specific for S. roseosporus.

[0148] In another aspect, the invention provides a nucleic acid molecule that selectively hybridizes to a nucleic acid molecule as described above. In a preferred embodiment, the invention provides a nucleic acid molecule that selectively hybridizes to a nucleic acid molecule that encodes DptA, DptBC, DptD or DptH. In another preferred embodiment, the invention provides a nucleic acid molecules that selectively hybridizes to a nucleic acid molecule that encodes SEQ ID NOS: 9, 11, 7 or 8. In an even more preferred embodiment, the invention provides a nucleic acid molecule that selectively hybridizes to a nucleic acid molecule comprising the nucleic acid sequence of dptA, dptBC, dptD or dptH. In another preferred embodiment, the invention provides a nucleic acid molecule that selectively hybridizes to a nucleic acid molecule comprising the nucleic acid sequence SEQ ID NOS: 10, 12, 3 or 6. The invention also provides a nucleic acid molecule that selectively hybridizes to a nucleic acid molecule comprising an S. roseosporus nucleic acid sequence from any one of BAC clones B12:01G05, B12:06A12, B12:12F06, B12:18H04, B12:20C09 or B12:03A05, preferably that from B12:03A05. In a preferred embodiment, the invention provides a nucleic acid molecule that selectively hybridizes to a nucleic acid molecule encoding SEQ ID NOS: 19, 21, 23, 25, 27, 29, 31, 33, 35, 37, 39, 41, 43, 45, 47, 49, 51, 53, 55, 57, 59, 61, 63, 65, 67, 69, 71, 73, 75, 77, 79, 81, 83, 85, 87, 89, 91, 93, 95, 97, 99, 101, 104, 108, 110, 112, 114, 116, 118, 120, 122, 124, 126, 128, 130, 132, 134 or 136 or to a nucleic acid molecule comprising the nucleic acid sequence SEQ ID NOS: 20, 22, 24, 26, 28, 30, 32, 34, 36, 38, 40, 42, 44, 46, 48, 50, 52, 54, 56, 58, 60, 62, 64, 66, 68, 70, 72, 74, 76, 78, 80, 82, 84, 86, 88, 90, 92, 94, 96, 98, 100, 102, 105, 107, 109, 111, 113, 115, 117, 119, 121, 123, 125, 127, 129, 131, 133 or 135. The selective hybridization of any of the above-described nucleic acid sequences may be performed under low stringency hybridization conditions. In a preferred embodiment, the selective hybridization is performed under high stringency hybridization conditions. In a preferred embodiment of the invention, the hybridizing nucleic acid molecule may be used to recombinantly express a polypeptide of the invention.

[0149] In another aspect, the invention provides a nucleic acid molecule that is homologous to a nucleic acid encoding a daptomycin NRPS or subunit thereof, a thioesterase from a daptomycin biosynthetic gene cluster, or a nucleic acid molecule comprising an S. roseosporus nucleic acid sequence from any one of BAC clones B12:01G05, B12:06A12, B12:12F06, B12:18H04, B12:20C09 or, preferably, B12:03A05. The invention provides a nucleic acid molecule homologous to a nucleic acid molecule encoding DptA, DptBC, DptD or DptH. In one embodiment, the nucleic acid molecule is homologous to a nucleic acid molecule encoding a polypeptide having an amino acid sequence of SEQ ID NOS: 9, 11, 7 or 8. In a preferred embodiment, the nucleic acid molecule is homologous to any one or more of dptA, dptBC or dptD. In another embodiment, the nucleic acid molecule is homologous to a thioesterase encoded by the thioesterase domain of dptD or by dptH. In a more preferred embodiment, the nucleic acid molecule is homologous to a nucleic acid molecule having a nucleic acid sequence of SEQ ID NOS: 10, 12, 3 or 6. In another preferred embodiment, the invention provides a nucleic acid molecule that is homologous to a nucleic acid molecule encoding SEQ ID NOS: 19, 21, 23, 25, 27, 29, 31, 33, 35, 37, 39, 41, 43, 45, 47, 49, 51, 53, 55, 57, 59, 61, 63, 65, 67, 69, 71, 73, 75, 77, 79, 81, 83, 85, 87, 89, 91, 93, 95, 97, 99, 101, 104, 108, 110, 112, 114, 116, 118, 120, 122, 124, 126, 128, 130, 132, 134 or 136 or to a nucleic acid molecule comprising the nucleic acid sequence SEQ ID NOS: 20, 22, 24, 26, 28, 30, 32, 34, 36, 38, 40, 42, 44, 46, 48, 50, 52, 54, 56, 58, 60, 62, 64, 66, 68, 70, 72, 74, 76, 78, 80, 82, 84, 86, 88, 90, 92, 94, 96, 98, 100, 102, 105, 107, 109, 111, 113, 115, 117, 119, 121, 123, 125, 127, 129, 131, 133 or 135. In a preferred embodiment, a homologous nucleic acid molecule is one that has at least 60%, 70%, 80% or 85% sequence identity with a nucleic acid molecule described herein. In a more preferred embodiment, the homologous nucleic acid molecule is one that has at least 90%, 95%, 97%, 98% or 99% sequence identity with a nucleic acid molecule described herein. Further, in one embodiment, a homologous nucleic acid molecule is homologous over its entire length to a nucleic acid molecule encoding a daptomycin NRPS or subunit thereof, a thioesterase, or nucleic acid molecule that encodes a polypeptide as described herein. In another embodiment, a homologous nucleic acid molecule is homologous over only a part of its length to a nucleic acid molecule described herein, wherein the part is at least 50 nucleotides of the nucleic acid molecule, preferably at least 100 nucleotides, more preferably at least 200 nucleotides, even more preferably at least 300 nucleotides.

[0150] In another embodiment, the invention provides a nucleic acid that is an allelic variant of a gene encoding a daptomycin NRPS or subunit thereof, a thioesterase from a daptomycin biosynthetic gene cluster, or a nucleic acid molecule comprising an S. roseosporus nucleic acid sequence from any one of BAC clones B12:01G05, B12:06A12, B12:12F06, B12:18H04, B12:20C09 or B12:03A05. In a preferred embodiment, the invention provides a nucleic acid that is an allelic variant of dptA, dptBC, dptD or dptH. In an even more preferred embodiment, the allelic variant is a variant of a gene, wherein the gene encodes DptA, DptBC, DptD or DptH. In another preferred embodiment, the allelic variant is a variant of a gene that encodes a polypeptide comprising an amino acid sequence of SEQ ID NOS: 9, 11, 7 or 8. In a yet more preferred embodiment, the allelic variant is a variant of a gene, wherein the gene has the nucleic acid sequence of SEQ ID NOS: 10, 12, 3 or 6. An allelic variant of dptH or the thioesterase of dptD preferably encodes a thioesterase with the same or similar enzymatic activity compared to that of the polypeptide having the amino acid sequence of the thioesterase domain of SEQ ID NO: 7 or has the amino acid sequence of SEQ ID NO: 8. An allelic variant of dptA, dptBC or dptD preferably encodes a polypeptide having the same activity as the daptomycin NRPS having the amino acid sequences of SEQ ID NOS: 9, 11 or 7, respectively. In another embodiment, the invention provides an allelic variant of a nucleic acid molecule that encodes SEQ ID NOS: 19, 21, 23, 25, 27, 29, 31, 33, 35, 37, 39, 41, 43, 45, 47, 49, 51, 53, 55, 57, 59, 61, 63, 65, 67, 69, 71, 73, 75, 77, 79, 81, 83, 85, 87, 89, 91, 93, 95, 97, 99, 101, 104, 108, 110, 112, 114, 116, 118, 120, 122, 124, 126, 128, 130, 132, 134 or 136 or to a nucleic acid molecule comprising the nucleic acid sequence SEQ ID NOS: 20, 22, 24, 26, 28, 30, 32, 34, 36, 38, 40, 42, 44, 46, 48, 50, 52, 54, 56, 58, 60, 62, 64, 66, 68, 70, 72, 74, 76, 78, 80, 82, 84, 86, 88, 90, 92, 94, 96, 98, 100, 102, 105, 107, 109, 111, 113, 115, 117, 119, 121, 123, 125, 127, 129, 131, 133 or 135. In a preferred embodiment, the allelic variant encodes a polypeptide having the same biological activity of the polypeptide; e.g., it encodes a polypeptide having ABC-transporter activity.

[0151] A further object of the invention is to provide a nucleic acid molecule that comprises a part of a nucleic acid sequence of the instant invention. The invention provides a part of a nucleic acid molecule encoding a daptomycin NRPS, a subunit thereof, a thioesterase from a daptomycin biosynthetic gene cluster, or a part of a nucleic acid molecule that comprises an S. roseosporus nucleic acid sequence from any one of BAC clones B12:01G05, B12:06A12, B12:12F06, B12:18H04, B12:20C09 or, preferably, B12:03A05. The invention also provides a part of a selectively-hybridizing or homologous nucleic acid molecule, as described above. The invention provides a part of an allelic variant of a nucleic acid molecule, as described above. A part comprises at least 10 nucleotides, more preferably at least 15, 20, 25, 30, 35, 40, 50, 100, 150, 200, 250 or 300 nucleotides. The maximum size of a nucleic acid part is one nucleotide shorter than the entire nucleic acid molecule, if the nucleic acid molecule encodes more than one gene, or is one nucleotide shorter than the nucleic acid molecule encoding the full-length protein, if the nucleic acid molecule encodes a single polypeptide.

[0152] In another aspect, the hybridizing or homologous nucleic acid molecule, the allelic variant, or the part of the nucleic acid molecule encodes a polypeptide that has the same biological activity as the native (wild-type) polypeptide.

[0153] In another aspect, the invention provides a nucleic acid molecule that encodes a fusion protein, a homologous protein, a polypeptide fragment, a mutein or a polypeptide analog, as described below.

[0154] A nucleic acid molecule of this invention may encode a single polypeptide or multiple polypeptides. In one embodiment, the invention provides a nucleic acid molecule that encodes multiple, translationally coupled polypeptides, e.g., a nucleic acid molecule that encodes DptA, DptBC and DptD. The invention also provides a nucleic acid molecule that encodes a single polypeptide derived from S. roseosporus, e.g., DptA, DptBC or DptD, or a polypeptide fragment, mutein, fusion protein, polypeptide analog or homologous protein thereof. The invention also provides nucleic acid sequences, such as expression control sequences, that are not associated with other S. roseosporus sequences.

[0155] In certain embodiments, the nucleic acid molecules of this invention may not include any one or more of the plasmids, cosmids designated, pRHB153, pRHB157, pRHB159, pRHB160, pRHB161, pRHB162, pRHB166, pRHB168, pRHB169, pRHB170, pRHB172, pRHB173, pRHB174, pRHB599, pRHB602, pRHB603, pRHB613, pRHB614, pRHB680, pRHB678 or pRHB588 by McHenney et al., J. Bacteriol. 180:143-151 (1998), herein incorporated by reference in its entirety to the extent any of those plasmids or cosmids are part of the prior art and fall within the scope of any specific claim made in this application. Further analysis performed has indicated that the location and orientation of some of the daptomycin inserts in plasmids or cosmids recited in McHenney et al., supra, are incorrect.

[0156] Expression Control Sequences

[0157] In another embodiment, the invention provides a nucleic acid molecule comprising one or more expression control sequences from a gene comprising a nucleic acid sequence that encodes a thioesterase or daptomycin NRPS from the daptomycin biosynthetic gene cluster. In a preferred embodiment, the nucleic acid molecule comprises a part or all of the expression control sequences of the daptomycin NRPS or dptH. In a yet more preferred embodiment, the nucleic acid molecule comprises all or a part of SEQ ID NO: 2 or SEQ ID NO: 5. In another preferred embodiment, the nucleic acid molecule comprises an expression control sequence from an S. roseosporus nucleic acid sequence from any one of BAC clones B12:01G05, B12:06A12, B12:12F06, B12:18H04, B12:20C09 or, preferably, B12:03A05. Without wishing to be bound by any theory, it is thought that the nucleic acid sequence upstream of dptA in the daptomycin biosynthetic gene cluster (SEQ ID NO: 2) comprises the native expression control sequences for dptA, dptBC and dptD. Further, it is thought that a single transcript for dptA, dptBC and dptD is generated and that expression of DptA, DptBC and DptD are translationally coupled.

[0158] In a preferred embodiment, the entire expression control sequence of a gene comprising a nucleic acid sequence that encodes a daptomycin NRPS and/or a thioesterase from the daptomycin biosynthetic gene cluster is used to control transcription. In another embodiment, only a part of the expression control sequence of a gene comprising a nucleic acid sequence that encodes a daptomycin NRPS and/or a thioesterase from the daptomycin biosynthetic gene cluster is used to control transcription. One having ordinary skill in the art may determine which part(s) of the gene to use to control transcription using methods known in the art. For instance, one may ligate a nucleic acid sequence comprising all or a part of an expression control sequence of a daptomycin NRPS and/or a thioesterase gene into a vector comprising a reporter gene. Examples of such reporter genes include, without limitation, chloramphenicol acetyltransferase (CAT), luciferase, green fluorescent protein, β-galactosidase and the like. The nucleic acid molecule comprising the expression control sequence is ligated into the vector such that it can act as a promoter or enhancer of the reporter gene. The vector is introduced into a host cell and expression is induced. Then, one may assay for the production of the reporter gene product to determine if the part(s) of the expression control sequence is sufficient to activate or regulate transcription. Methods of determining whether a nucleic acid sequence is sufficient to regulate transcription are routine and well-known in the art. See, e.g., Ausubel et al., supra.

[0159] A nucleic acid molecule comprising all or a part of an expression control sequence described herein, or multiple copies of these expression control sequences or parts thereof, may be operatively linked to a second nucleic acid molecule to regulate the transcription of the second nucleic acid molecule. In one embodiment, the invention provides a nucleic acid molecule comprising the expression control sequences operatively linked to a heterologous nucleic acid molecule, such as a nucleic acid molecule that encodes a polypeptide not usually expressed by S. roseosporus. In another preferred embodiment, the nucleic acid molecule comprising the expression control sequences is inserted into a vector, preferably a bacterial vector. In a more preferred embodiment, the vector is introduced into a bacterial host cell, more preferably into a Streptomyces or E. coli, and even more preferably into a S. roseosporus, S. lividans or S. fradiae host cell.

[0160] The invention also provides a nucleic acid sequence comprising the expression control sequence from S. roseosporus as described herein operatively linked to a nucleic acid sequence encoding a polypeptide involved in a daptomycin NRPS, a thioesterase derived from the daptomycin biosynthetic gene cluster, or a nucleic acid molecule from a BAC clone or part there as described herein. The expression control sequence may be operatively linked to a nucleic acid molecule encoding DptA, DptBC, DptD or DptH, to a nucleic acid molecule encoding a polypeptide derived from the S. roseosporus sequences from a BAC clone of the invention, preferably B12:03A05, or to a nucleic acid molecule encoding a fragment, homologous protein, mutein, analog, derivative or fusion protein thereof. The expression control sequence may be operatively linked to a nucleic acid sequence encoding a polypeptide comprising an amino acid sequence of SEQ ID NOS: 9, 11, 7 or 8, or to a fragment thereof. Preferably, the expression control sequence is operatively linked to the coding region of one or more of dptA, dptBC, dptD or dptH. In a more preferred embodiment, the expression control sequence is operatively linked to a nucleic acid sequence selected from SEQ ID NOS: 10, 12, 3 or 6, or to a part thereof. The invention also provides an expression control sequence operatively linked to the coding region of a polypeptide comprising an amino acid sequence SEQ ID NOS: 19, 21, 23, 25, 27, 29, 31, 33, 35, 37, 39, 41, 43, 45, 47, 49, 51, 53, 55, 57, 59, 61, 63, 65, 67, 69, 71, 73, 75, 77, 79, 81, 83, 85, 87, 89, 91, 93, 95, 97, 99, 101, 104, 108, 110, 112, 114, 116, 118, 120, 122, 124, 126, 128, 130, 132, 134 or 136 or to a nucleic acid molecule comprising the nucleic acid sequence SEQ ID NOS: 20, 22, 24, 26, 28, 30, 32, 34, 36, 38, 40, 42, 44, 46, 48, 50, 52, 54, 56, 58, 60, 62, 64, 66, 68, 70, 72, 74, 76, 78, 80, 82, 84, 86, 88, 90, 92, 94, 96, 98, 100, 102, 105, 107, 109, 111, 113, 115, 117, 119, 121, 123, 125, 127, 129, 131, 133 or 135.

[0161] In another embodiment, the invention provides a nucleic acid molecule comprising one or more expression control sequences that directs the transcription of a nucleic acid molecule encoding a daptomycin NRPS, a subunit, module or domain thereof, a thioesterase, or a nucleic acid molecule encoding a polypeptide derived from the S. roseosporus sequences from a BAC clone of the invention, wherein the expression control sequence(s) are not derived from a daptomycin biosynthetic gene cluster. Examples of suitable expression control sequences are provided infra.

[0162] Expression Vectors, Host Cells and Recombinant Methods of Producing Polypeptides

[0163] Nucleic acid sequences may be expressed by operatively linking them to an expression control sequence in an appropriate expression vector and employing that expression vector to transform an appropriate unicellular host. Expression control sequences are sequences which control the transcription, post-transcriptional events and translation of nucleic acid sequences. Such operative linking of a nucleic sequence of this invention to an expression control sequence, of course, includes, if not already part of the nucleic acid sequence, the provision of a translation initiation codon, ATG or GTG, in the correct reading frame upstream of the nucleic acid sequence.

[0164] A wide variety of host/expression vector combinations may be employed in expressing the nucleic acid sequences of this invention. Useful expression vectors, for example, may consist of segments of chromosomal, non-chromosomal and synthetic nucleic acid sequences.

[0165] In a preferred embodiment, bacterial host cells are used to express the nucleic acid molecules of the instant invention. Useful expression vectors for bacterial hosts include bacterial plasmids, such as those from E. coli or Streptomyces, including pBluescript, pGEX-2T, pUC vectors, col E1, pCR1, pBR322, pMB9 and their derivatives, wider host range plasmids, such as RP4, phage DNAs, e.g., the numerous derivatives of phage lambda, e.g., NM989, λGT10 and λGT11, and other phages, e.g., M13 and filamentous single stranded phage DNA. A preferred vector is a bacterial artificial chromosome (BAC). A more preferred vector is pStreptoBAC, as described in Example 2.

[0166] In other embodiments, eukaryotic host cells, such as yeast, insect or mammalian cells, may be used. Yeast vectors include Yeast Integrating plasmids (e.g., YIp5) and Yeast Replicating plasmids (the YRp and YEp series plasmids), Yeast centromere plasmids (the YCp series plasmids), pGPD-2, 2μ plasmids and derivatives thereof, and improved shuttle vectors such as those described in Gietz and Sugino, Gene, 74, pp. 527-34 (1988) (YIplac, YEplac and YCplac). Expression in mammalian cells can be achieved using a variety of plasmids, including pSV2, pBC12BI, and p91023, as well as lytic virus vectors (e.g., vaccinia virus, adeno virus, and baculovirus), episomal virus vectors (e.g., bovine papillomavirus), and retroviral vectors (e.g., murine retroviruses). Useful vectors for insect cells include baculoviral vectors and pVL 941.

[0167] In addition, any of a wide variety of expression control sequences may be used in these vectors to express the DNA sequences of this invention. Such useful expression control sequences include the expression control sequences associated with structural genes of the foregoing expression vectors. Expression control sequences that control transcription include, e.g., promoters, enhancers and transcription termination sites. Expression control sequences in eukaryotic cells that control post-transcriptional events include splice donor and acceptor sites and sequences that modify the half-life of the transcribed RNA, e.g., sequences that direct poly(A) addition or binding sites for RNA-binding proteins. Expression control sequences that control translation include ribosome binding sites, sequences which direct targeted expression of the polypeptide to or within particular cellular compartments, and sequences in the 5′ and 3′ untranslated regions that modify the rate or efficiency of translation.

[0168] Examples of useful expression control sequences include, for example, the early and late promoters of SV40 or adenovirus, the lac system, the trp system, the TAC or TRC system, the T3 and T7 promoters, the major operator and promoter regions of phage lambda, the control regions of fd coat protein, the promoter for 3-phosphoglycerate kinase or other glycolytic enzymes, the promoters of acid phosphatase, e.g., Pho5, the promoters of the yeast α-mating system, the GAL1 or GAL10 promoters, and other constitutive and inducible promoter sequences known to control the expression of genes of prokaryotic or eukaryotic cells or their viruses, and various combinations thereof. Other expression control sequences include those from the daptomycin biosynthetic gene cluster, such as those described supra.

[0169] Preferred nucleic acid vectors also include a selectable or amplifiable marker gene and means for amplifying the copy number of the gene of interest. Such marker genes are well-known in the art. Nucleic acid vectors may also comprise stabilizing sequences (e.g., ori- or ARS-like sequences and telomere-like sequences), or may alternatively be designed to favor directed or non-directed integration into the host cell genome. Preferred marker genes and stabilizing sequences are disclosed in pStreptoBAC, which is described in Example 2. In a preferred embodiment, nucleic acid sequences of this invention are inserted in frame into an expression vector that allows high level expression of an RNA which encodes a protein comprising the encoded nucleic acid sequence of interest. Nucleic acid cloning and sequencing methods are well known to those of skill in the art and are described in an assortment of laboratory manuals, including Sambrook et al., supra, 1989; and Ausubel et al. Product information from manufacturers of biological, chemical and immunological reagents also provide useful information. Example 2 provides preferred nucleic acid cloning and sequencing methods.

[0170] Of course, not all vectors and expression control sequences will function equally well to express the nucleic acid sequences of this invention. Neither will all hosts function equally well with the same expression system. However, one of skill in the art may make a selection among these vectors, expression control sequences and hosts without undue experimentation and without departing from the scope of this invention. For example, in selecting a vector, the host must be considered because the vector must be replicated in it. The vector's copy number, the ability to control that copy number, the ability to control integration, if any, and the expression of any other proteins encoded by the vector, such as antibiotic or other selection markers, should also be considered.

[0171] In selecting an expression control sequence, a variety of factors should also be considered. These include, for example, the relative strength of the sequence, its controllability, and its compatibility with the nucleic acid sequence of this invention, particularly with regard to potential secondary structures. Unicellular hosts should be selected by consideration of their compatibility with the chosen vector, the toxicity of the product coded for by the nucleic acid sequences of this invention, their secretion characteristics, their ability to fold the polypeptide correctly, their fermentation or culture requirements, and the ease of purification from them of the products coded for by the nucleic acid sequences of this invention.

[0172] The recombinant nucleic acid molecules and more particularly, the expression vectors of this invention may be used to express the polypeptides of this invention as recombinant polypeptides in a heterologous host cell. The polypeptides of this invention may be full-length or less than full-length polypeptide fragments recombinantly expressed from the nucleic acid sequences according to this invention. Such polypeptides include analogs, derivatives and muteins that may or may not have biological activity. In a preferred embodiment, the polypeptides are expressed in a heterologous bacterial host cell. In a more preferred embodiment, the polypeptides are expressed in a heterologous Streptomyces host cell, still more preferably a S. lividans or S. fradiae host cell. See, e.g., Example 7, infra.

[0173] Transformation and other methods of introducing nucleic acids into a host cell (e.g., conjugation, protoplast transformation or fusion, transfection, electroporation, liposome delivery, membrane fusion techniques, high velocity DNA-coated pellets, viral infection and protoplast fusion) can be accomplished by a variety of methods which are well known in the art (see, for instance, Ausubel, supra, and Sambrook et al., supra). Bacterial, yeast, plant or mammalian cells are transformed or transfected with an expression vector, such as a plasmid, a cosmid, or the like, wherein the expression vector comprises the nucleic acid of interest. Alternatively, the cells may be infected by a viral expression vector comprising the nucleic acid of interest. Depending upon the host cell, vector, and method of transformation used, transient or stable expression of the polypeptide will be constitutive or inducible. One having ordinary skill in the art will be able to decide whether to express a polypeptide transiently or in a stable manner, and whether to express the protein constitutively or inducibly.

[0174] A wide variety of unicellular host cells are useful in expressing the DNA sequences of this invention. These hosts may include well known eukaryotic and prokaryotic hosts, such as strains of E. coli, Pseudomonas, Bacillus, Streptomyces, fungi, yeast, insect cells such as Spodoptera frugiperda (SF9), animal cells such as CHO, BHK, MDCK and various murine cells, e.g., 3T3 and WEHI cells, African green monkey cells such as COS 1, COS 7, BSC 1, BSC 40, and BMT 10, and human cells such as VERO, WI38, and HeLa cells, as well as plant cells in tissue culture. In a preferred embodiment, the host cell is Streptomyces. In a more preferred embodiment, the host cell is S. roseosporus, S. lividans or S. fradiae.

[0175] Particular details of the transfection, expression and purification of recombinant proteins are well documented and are understood by those of skill in the art. Further details on the various technical aspects of each of the steps used in recombinant production of foreign genes in bacterial cell expression systems can be found in a number of texts and laboratory manuals in the art. See, e.g., Ausubel et al., supra, and Sambrook et al., supra, and Kieser et al., supra, herein incorporated by reference.

[0176] Polypeptides

[0177] Thioesterases and Fragments Thereof

[0178] Another object of the invention is to provide a polypeptide derived from a thioesterase involved in daptomycin synthesis. In one embodiment, the polypeptide is derived from a daptomycin biosynthetic gene cluster. In a preferred embodiment, the polypeptide is derived from an integral or free thioesterase. In a more preferred embodiment, the polypeptide comprises the thioesterase domain of DptD or the amino acid sequence of DptH. In an even more preferred embodiment, the polypeptide comprises the amino acid sequence of the thioesterase domain of SEQ ID NO: 7 or the amino acid sequence of SEQ ID NO: 8. The polypeptide derived from a thioesterase may also be encoded by an S. roseosporus nucleic acid sequence from any one of BAC clones B12:01G05, B12:06A12, B12:12F06, B12:18H04, B12:20C09 or B12:03A05, preferably from B12:03A05. A polypeptide as defined herein may be produced recombinantly, as discussed supra, may be isolated from a cell that naturally expresses the protein, or may be chemically synthesized following the teachings of the specification and using methods well known to those having ordinary skill in the art. See, e.g., Examples 3-6.

[0179] The polypeptide may comprise a fragment of a thioesterase as defined herein. A polypeptide that comprises only a part or fragment of the entire thioesterase may or may not encode a polypeptide that has thioesterase activity. A polypeptide that does not have thioesterase activity, whether it is a fragment, analog, mutein, homologous protein or derivative, is nevertheless useful, especially for immunizing animals to prepare anti-thioesterase antibodies. However, in a preferred embodiment, the part or fragment encodes a polypeptide having thioesterase activity. Methods of determining whether a polypeptide has thioesterase activity are described infra. Further, in a preferred embodiment, the fragment comprises an amino acid sequence comprising the GXSXG thioesterase motif (see Example 3). In a more preferred embodiment, the fragment comprises an amino acid sequence comprising the thioesterase motif GWSFG or GTSLG, which are derived from the thioesterase domain of SEQ ID NO: 7 or the amino acid sequence of SEQ ID NO: 8, respectively.

[0180] One can produce fragments of a polypeptide encoding a thioesterase by truncating the DNA encoding the thioesterase and then expressing it recombinantly. Alternatively, one can produce a fragment by chemically synthesizing a portion of the full-length polypeptide. One may also produce a fragment by enzymatically cleaving either a recombinant polypeptide or an isolated naturally-occurring polypeptide. Methods of producing polypeptide fragments are well-known in the art (see, e.g., Sambrook et al. and Ausubel et al., supra). In one embodiment, a polypeptide comprising only a part or fragment of a thioesterase may be produced by chemical or enzymatic cleavage of a thioesterase. In a preferred embodiment, a polypeptide fragment is produced by expressing a nucleic acid molecule encoding a fragment of the thioesterase in a host cell.

[0181] Daptomycin NRPS Polypeptides, and Subunits and Fragments Thereof

[0182] Another object of the invention is to provide a polypeptide derived from a daptomycin NRPS or subunit thereof. The daptomycin NRPS comprises the subunits DptA, DptBC and DptD. As discussed in greater detail in Examples 3-6 below, each subunit comprises a number of modules that bind and activate specific building block substrates and to catalyze peptide chain formation and elongation. Further, each module comprises a number of domains that participate in condensation, adenylation and thiolation. In addition, some modules comprise a epimerization domain, discussed in greater detail in Example 6. DptD also comprises a thioesterase domain, as discussed supra and in Example 5.

[0183] In one embodiment, the polypeptide comprises an amino acid sequence from DptA, DptBC and/or DptD. In an even more preferred embodiment, the polypeptide comprises an amino acid sequence SEQ ID NOS: 9, 11 or 7. A daptomycin NRPS polypeptide may also be encoded by an S. roseosporus nucleic acid sequence from any one of BAC clones B12:01G05, B12:06A12, B12:12F06, B12:18H04, B12:20C09 or B12:03A05, preferably from B12:03A05. A polypeptide as defined herein may be produced recombinantly, as discussed supra, may be isolated from a cell that naturally expresses the protein, or may be chemically synthesized following the teachings of the specification and using methods well known to those having ordinary skill in the art. See, e.g., Examples 3-6 regarding amino acid sequences as well as modules and domains of DptA, DptBC and DptD.

[0184] The polypeptide may comprise a fragment of a daptomycin NRPS as defined herein. In one embodiment, a fragment comprises one or more complete modules of a daptomycin NRPS subunit. In another embodiment, a fragment comprises one or more domains of a daptomycin NRPS subunit. In yet another embodiment, a fragment may not comprise a complete domain or module but may comprise only a part of one or more domains or modules. A polypeptide that does not comprise a full domain or module of a daptomycin NRPS, whether it is a fragment, analog, mutein, homologous protein or derivative, is nevertheless useful, especially for immunizing animals to prepare anti-thioesterase antibodies. In a more preferred embodiment, the fragment comprises an amino acid sequence comprising at least that part of an adenylation domain that is required for binding to an amino acid. This part of the domain is delimited by the amino acid pocket code of a particular adenylation domain, as discussed below in Example 5.

[0185] As discussed above, one can produce fragments of a polypeptide of the invention recombinantly, by chemical synthesis or by enzymatic cleavage.

[0186] Polypeptides from S. roseosporus BAC Clones

[0187] Another object of the invention is to provide a polypeptide encoded by a nucleic acid molecule or part thereof from a S. roseosporus BAC clone of the invention. In one embodiment, the invention provides a polypeptide encoded by a nucleic acid molecule or part thereof from 1G05, B12:06A12, B12:12F06, B12:18H04, B12:20C09 or, preferably, B12:03A05. In a preferred embodiment, the invention provides a polypeptide comprising an amino acid sequence SEQ ID NOS: 19, 21, 23, 25, 27, 29, 31, 33, 35, 37, 39, 41, 43, 45, 47, 49, 51, 53, 55, 57, 59, 61, 63, 65, 67, 69, 71, 73, 75, 77, 79, 81, 83, 85, 87, 89, 91, 93, 95, 97, 99, 101, 104, 108, 110, 112, 114, 116, 118, 120, 122, 124, 126, 128, 130, 132, 134 or 136 or encoded by a nucleic acid molecule comprising the nucleic acid sequence SEQ ID NOS: 20, 22, 24, 26, 28, 30, 32, 34, 36, 38, 40, 42, 44, 46, 48, 50, 52, 54, 56, 58, 60, 62, 64, 66, 68, 70, 72, 74, 76, 78, 80, 82, 84, 86, 88, 90, 92, 94, 96, 98, 100, 102, 105, 107, 109, 111, 113, 115, 117, 119, 121, 123, 125, 127, 129, 131, 133 or 135. In another preferred embodiment, the invention provides a polypeptide that is DptE or DptF, a polypeptide having an amino acid sequence of SEQ ID NO: 15 or SEQ ID NO: 17, or encoded by dptE or dptF, or encoded by a nucleic acid sequence of SEQ ID NO: 16 or SEQ ID NO: 18. In another preferred embodiment, the invention provides an ABC transporter comprising an amino acid sequence SEQ ID NOS: 19, 21, 29, 45, 47, 49, 63, 67, 75 and 77, or encoded by a nucleic acid sequence of SEQ ID NOS: 20, 22, 30, 46, 48, 50, 64, 68, 76 or 78. In another preferred embodiment, the invention provides a polypeptide that is an oxidoreductase, such as a dehydrogenase; a transcriptional regulator involved in antibiotic resistance; NovABC-related polypeptides, which are involved in the biosynthesis of novobiocin, an antimicrobial agent; a monooxygenase; an acyl CoA thioesterase; a DNA helicase; or a DNA ligase, such as provided by a polypeptide having an amino acid sequence selected from SEQ ID NOS: 23, 25, 27, 29, 33, 35, 37, 91, 93, 97 and 99. In another preferred embodiment, the invention provides a polypeptide that is highly homologous to a Streptomyces polypeptide, such as provided by a polypeptide having an amino acid sequence selected from SEQ ID NOS: 61, 65, 69, 79, 81, 83, 85, 87, 95 and 101. A polypeptide as defined herein may be produced recombinantly, as discussed supra, may be isolated from a cell that naturally expresses the protein, or may be chemically synthesized following the teachings of the specification and using methods well known to those having ordinary skill in the art. The invention also provides a polypeptide that comprises a fragment of a nucleic acid molecule that encodes a polypeptide from a BAC clone, as defined herein. As discussed above, one can produce fragments of a polypeptide of the invention recombinantly, by chemical synthesis or by enzymatic cleavage.

[0188] Muteins, Homologous Proteins, Allelic Variants, Analogs and Derivatives

[0189] Another object of the invention is to provide polypeptides that are mutant proteins (muteins), fusion proteins, homologous proteins or allelic variants of the daptomycin NRPS, subunits thereof, thioesterases or the polypeptides encoded by the S. roseosporus BAC nucleic acid molecules or parts thereof provided herein. A mutant thioesterase may have the same or different enzymatic activity compared to a naturally-occurring thioesterase and comprises at least one amino acid insertion, duplication, deletion, rearrangement or substitution compared to the amino acid sequence of a native protein. In one embodiment, the mutein has the same or a decreased thioesterase activity compared to a naturally-occurring thioesterase. In another embodiment, the mutant thioesterase has an increased thioesterase activity compared to a naturally-occurring thioesterase. In a preferred embodiment, muteins of thioesterases of a daptomycin biosynthetic gene cluster may be used to alter thioesterase activity. See, e.g., Examples 12 and 13. In another embodiment, a mutant daptomycin NRPS or subunit thereof may have the same or different amino acid specificity, thiolation activity, condensation activity, or, if present, epimerization activity, as a naturally-occurring daptomycin NRPS. Daptomycin NRPS muteins may be used to alter amino acid recognition, binding, epimerization or other catalytic properties of an NRPS. See, e.g., Examples 12 and 16. Similarly, a mutein of a polypeptide encoded by the S. roseosporus BAC nucleic acid molecule of the invention may have a similar biological activity or a different one, but preferably has a similar biological activity.

[0190] A mutein of the invention may be produced by isolation from a naturally-occurring mutant microorganism or from a microorganism that has been experimentally mutagenized, may be produced by chemical manipulation of a polypeptide, or may be produced from a host cell comprising an altered nucleic acid molecule. In a preferred embodiment, the mutein is produced from a host cell comprising an altered nucleic acid molecule. Muteins may also be produced chemically by altering the amino acid residue to another amino acid residue using synthetic or semi-synthetic chemical techniques. One may produce muteins of a polypeptide by introducing mutations into the nucleic acid sequence encoding a daptomycin NRPS, subunit thereof or a thioesterase, or into a S. roseosporus BAC nucleic acid molecule, and then expressing it recombinantly. These mutations may be targeted, in which particular encoded amino acids are altered, or may be untargeted, in which random encoded amino acids within the polypeptide are altered. Muteins with random amino acid alterations can be screened for a particular biological activity, such as thioesterase activity, amino acid specificity, thiolation activity, epimerization activity, or condensation activity, as described below. Muteins may also be screened, e.g., for oxidoreductase activity, ABC transporter activity, monooxygenase activity, or DNA ligase or helicase activity using methods known in the art. Multiple random mutations can be introduced into the gene by methods well-known to the art, e.g., by error-prone PCR, shuffling, oligonucleotide-directed mutagenesis, assembly PCR, sexual PCR mutagenesis, in vivo mutagenesis, cassette mutagenesis, recursive ensemble mutagenesis, exponential ensemble mutagenesis and site-specific mutagenesis. Methods of producing muteins with targeted or random amino acid alterations are well known in the art. See, e.g., Sambrook et al., supra, Ausubel et al., supra, U.S. Pat. No. 5,223,408, and the references discussed supra, each herein incorporated by reference.

[0191] The invention also provides a polypeptide that is homologous to a daptomycin NRPS, subunit thereof, a thioesterase from a daptomycin biosynthetic gene cluster, or to a polypeptide encoded by a S. roseosporus BAC nucleic acid molecule as described herein. In one embodiment, the polypeptide is homologous to the thioesterase domain of DptD or to DptH, or to a polypeptide encoded by the thioesterase domain of dptD or by dptH. In a preferred embodiment, the polypeptide is homologous to a thioesterase having the amino acid sequence of the thioesterase domain of SEQ ID NO: 7 or having the amino acid sequence of SEQ ID NO: 8. In another embodiment, the polypeptide is homologous to DptA, DptBC or DptD, or to a polypeptide encoded by dptA, dptBC or dptD. In a more preferred embodiment, the polypeptide is homologous to a polypeptide having the amino acid sequence of SEQ ID NO: 9, 11 or 3. The invention also provides a polypeptide that is homologous to a polypeptide encoded by a nucleic acid molecule from a S. roseosporus BAC clone described herein, e.g., 1G05, B12:06A12, B12:12F06, B12:18H04, B12:20C09 or, preferably, B12:03A05. In a preferred embodiment, the invention provides a polypeptide homologous to a polypeptide comprising an amino acid sequence of SEQ ID NOS: 19, 21, 23, 25, 27, 29, 31, 33, 35, 37, 39, 41, 43, 45, 47, 49, 51, 53, 55, 57, 59, 61, 63, 65, 67, 69, 71, 73, 75, 77, 79, 81, 83, 85, 87, 89, 91, 93, 95, 97, 99, 101, 104, 108, 110, 112, 114, 116, 118, 120, 122, 124, 126, 128, 130, 132, 134 or 136 or encoded by a nucleic acid molecule comprising a nucleic acid sequence selected from SEQ ID NOS: 20, 22, 24, 26, 28, 30, 32, 34, 36, 38, 40, 42, 44, 46, 48, 50, 52, 54, 56, 58, 60, 62, 64, 66, 68, 70, 72, 74, 76, 78, 80, 82, 84, 86, 88, 90, 92, 94, 96, 98, 100, 102, 105, 107, 109, 111, 113, 115, 117, 119, 121, 123, 125, 127, 129, 131, 133 or 135.

[0192] In a preferred embodiment, the homologous polypeptide is one that exhibits significant sequence identity to a polypeptide of the invention. In a more preferred embodiment, the homologous polypeptide is one that exhibits at least 50%, 60%, 70%, or 80% sequence identity to a polypeptide comprising an amino acid sequence of SEQ ID NOS: 9, 11, 7 or 8 or SEQ ID NOS: 19, 21, 23, 25, 27, 29, 31, 33, 35, 37, 39, 41, 43, 45, 47, 49, 51, 53, 55, 57, 59, 61, 63, 65, 67, 69, 71, 73, 75, 77, 79, 81, 83, 85, 87, 89, 91, 93, 95, 97, 99, 101, 104, 108, 110, 112, 114, 116, 118, 120, 122, 124, 126, 128, 130, 132, 134 or 136. In an even more preferred embodiment, the homologous polypeptide is one that exhibits at least 85%, 90%, 95%, 96%, 97%, 98% or 99% sequence identity to a polypeptide comprising an amino acid sequence of SEQ ID NOS: 9, 11, 7 or 8 or SEQ ID NOS: 19, 21, 23, 25, 27, 29, 31, 33, 35, 37, 39, 41, 43, 45, 47, 49, 51, 53, 55, 57, 59, 61, 63, 65, 67, 69, 71, 73, 75, 77, 79, 81, 83, 85, 87, 89, 91, 93, 95, 97, 99, 101, 104, 108, 110, 112, 114, 116, 118, 120, 122, 124, 126, 128, 130, 132, 134 or 136.

[0193] The homologous protein may be a naturally-occurring one that is derived from another species, especially one derived from another Streptomyces species, or one derived from another Streptomyces roseosporus strain, wherein the homologous protein comprises an amino acid sequence that exhibits significant sequence identity to that of SEQ ID NOS: 9, 11, 7 or 8 or SEQ ID NOS: 19, 21, 23, 25, 27, 29, 31, 33, 35, 37, 39, 41, 43, 45, 47, 49, 51, 53, 55, 57, 59, 61, 63, 65, 67, 69, 71, 73, 75, 77, 79, 81, 83, 85, 87, 89, 91, 93, 95, 97, 99, 101, 104, 108, 110, 112, 114, 116, 118, 120, 122, 124, 126, 128, 130, 132, 134 or 136. The naturally-occurring homologous protein may be isolated directly from the other species or strain. Alternatively, the nucleic acid molecule encoding the naturally-occurring homologous protein may be isolated and used to express the homologous protein recombinantly. In another embodiment, the homologous protein may be one that is experimentally produced by random mutation of a nucleic acid molecule and subsequent expression of the nucleic acid molecule. In another embodiment, the homologous protein may be one that is experimentally produced by directed mutation of one or more codons to alter the encoded amino acid of the polypeptide.

[0194] In another embodiment, the invention provides a polypeptide encoded by an allelic variant of a gene encoding a thioesterase from a daptomycin biosynthetic gene cluster, or a daptomycin NRPS or subunit thereof. In a preferred embodiment, the invention provides a polypeptide encoded by an allelic variant of dptA, dptBC, dptD or dptH. In an even more preferred embodiment, the polypeptide is encoded by an allelic variant of a gene that encodes a polypeptide having the amino acid sequence of SEQ ID NOS: 9, 11, 7 or 8. In a yet more preferred embodiment, the polypeptide is encoded by an allelic variant of a gene, wherein the gene has the nucleic acid sequence of SEQ ID NOS: 10, 12, 3 or 6. An allelic variant may have the same or different biological activity as the thioesterase, daptomycin NRPS or subunit thereof, described herein. In a preferred embodiment, an allelic variant is derived from another species of Streptomyces, even more preferably from a strain of Streptomyces roseosporus. In another embodiment, the invention provides a polypeptide encoded by an allelic variant of an S. roseosporus nucleic acid sequence from any one of BAC clones B12:01G05, B12:06A12, B12:12F06, B12:18H04, B12:20C09 or B12:03A05, preferably from B12:03A05. In a preferred embodiment, the polypeptide is encoded by an allelic variant of a gene that encodes a polypeptide having the amino acid sequence of SEQ ID NOS: 19, 21, 23, 25, 27, 29, 31, 33, 35, 37, 39, 41, 43, 45, 47, 49, 51, 53, 55, 57, 59, 61, 63, 65, 67, 69, 71, 73, 75, 77, 79, 81, 83, 85, 87, 89, 91, 93, 95, 97, 99, 101, 104, 108, 110, 112, 114, 116, 118, 120, 122, 124, 126, 128, 130, 132, 134 or 136, or that is encoded by an allelic variant of a gene, wherein the gene has a nucleic acid sequence of SEQ ID NOS: 20, 22, 24, 26, 28, 30, 32, 34, 36, 38, 40, 42, 44, 46, 48, 50, 52, 54, 56, 58, 60, 62, 64, 66, 68, 70, 72, 74, 76, 78, 80, 82, 84, 86, 88, 90, 92, 94, 96, 98, 100, 102, 105, 107, 109, 111, 113, 115, 117, 119, 121, 123, 125, 127, 129, 131, 133 or 135.

[0195] In another embodiment, the invention provides a derivative of a polypeptide of the invention. In a preferred embodiment, the derivative has been acetylated, carboxylated, phosphorylated, glycosylated or ubiquitinated. In another preferred embodiment, the derivative has been labeled with, e.g., radioactive isotopes such as ¹²⁵I, ³²P, ³⁵S, and ³H. In another preferred embodiment, the derivative has been labeled with fluorophores, chemiluminescent agents, enzymes, and antiligands that can serve as specific binding pair members for a labeled ligand. In a preferred embodiment, the polypeptide is a thioesterase involved in the biosynthesis of daptomycin. In an even more preferred embodiment, the polypeptide comprises the thioesterase domain of DptD or comprises the amino acid sequence of DptH, or is a thioesterase encoded by the thioesterase-encoding domain of dptD or by dptH. In another preferred embodiment, the polypeptide is a daptomycin NRPS or subunit thereof, more preferably DptA, DptBC or DptD, even more preferably a polypeptide encoded by dptA, dptBC or dptD. In a yet more preferred embodiment, the polypeptide has an amino acid sequence of SEQ ID NOS: 9, 11, 7 or 8 or is a mutein, allelic variant, homologous protein or fragment thereof. Preferably, a thioesterase derivative has a thioesterase activity that is the same or similar to a thioesterase involved in the biosynthesis of daptomycin, more preferably, the derivative has a thioesterase activity that is the same or similar to a thioesterase having an amino acid sequence of the thioesterase domain of SEQ ID NO: 7 or having the amino acid sequence of SEQ ID NO: 8. In another preferred embodiment, a daptomycin NRPS or NRPS subunit derivative has the same or similar activity as a naturally-occurring daptomycin NRPS or subunit thereof. In yet another embodiment, the derivative is derived from a polypeptide encoded by a nucleic acid molecule from a S. roseosporus nucleic acid sequence from any one of BAC clones B12:01G05, B12:06A12, B12:12F06, B12:18H04, B12:20C09 or, preferably, B12:03A05. In a preferred embodiment, the derivative is derived from a polypeptide having an amino acid sequence of SEQ ID NOS: 19, 21, 23, 25, 27, 29, 31, 33, 35, 37, 39, 41, 43, 45, 47, 49, 51, 53, 55, 57, 59, 61, 63, 65, 67, 69, 71, 73, 75, 77, 79, 81, 83, 85, 87, 89, 91, 93, 95, 97, 99, 101, 104, 108, 110, 112, 114, 116, 118, 120, 122, 124, 126, 128, 130, 132, 134 or 136, or that is encoded by a gene having a nucleic acid sequence of SEQ ID NOS: 20, 22, 24, 26, 28, 30, 32, 34, 36, 38, 40, 42, 44, 46, 48, 50, 52, 54, 56, 58, 60, 62, 64, 66, 68, 70, 72, 74, 76, 78, 80, 82, 84, 86, 88, 90, 92, 94, 96, 98, 100, 102, 105, 107, 109, 111, 113, 115, 117, 119, 121, 123, 125, 127, 129, 131, 133 or 135.

[0196] The invention also provides non-peptide analogs. In a preferred embodiment, the non-peptide analog is structurally similar to a thioesterase involved in daptomycin synthesis, to a daptomycin NRPS or subunit thereof, or to a polypeptide encoded by a nucleic acid molecule from an S. roseosporus BAC clone, but in which one or more peptide linkages is replaced by a linkage selected from the group consisting of —CH₂NH—, —CH₂S—, —CH₂—CH₂—, —CH═CH— (cis and trans), —COCH₂—, —CH(OH)CH₂— and —CH₂SO—. In another embodiment, the non-peptide analog comprises substitution of one or more amino acids of a thioesterase or daptomycin NRPS or subunit thereof with a D-amino acid of the same type in order to generate more stable peptides. Preferably, both a non-peptide and a peptide analog has a biological activity that is the same or similar to the naturally-occurring polypeptide involved in the biosynthesis of daptomycin, more preferably, the analog has a biological activity that is the same or similar to the polypeptide having an amino acid sequence of SEQ ID NOS: 9, 11, 7 or 8. The invention also provides analogs of polypeptides encoded by an S. roseosporus nucleic acid sequence from any one of BAC clones B12:01G05, B12:06A12, B12:12F06, B12:18H04, B12:20C09 or B12:03A05, preferably from B12:03A05. The invention provides an analog of a polypeptide having an amino acid sequence of SEQ ID NOS: 19, 21, 23, 25, 27, 29, 31, 33, 35, 37, 39, 41, 43, 45, 47, 49, 51, 53, 55, 57, 59, 61, 63, 65, 67, 69, 71, 73, 75, 77, 79, 81, 83, 85, 87, 89, 91, 93, 95, 97, 99, 101, 104, 108, 110, 112, 114, 116, 118, 120, 122, 124, 126, 128, 130, 132, 134 or 136, or that is encoded by a gene having a nucleic acid sequence of SEQ ID NOS: 20, 22, 24, 26, 28, 30, 32, 34, 36, 38, 40, 42, 44, 46, 48, 50, 52, 54, 56, 58, 60, 62, 64, 66, 68, 70, 72, 74, 76, 78, 80, 82, 84, 86, 88, 90, 92, 94, 96, 98, 100, 102, 105, 107, 109, 111, 113, 115, 117, 119, 121, 123, 125, 127, 129, 131, 133 or 135.

[0197] Fusion Proteins

[0198] The polypeptides of this invention may be fused to other molecules, such as genetic, enzymatic or chemical or immunological markers such as epitope tags. Fusion partners include, inter alia, myc, hemagglutinin (HA), GST, immunoglobulins, β-galactosidase, biotin trpE, protein A, β-lactamase, α-amylase, maltose binding protein, alcohol dehydrogenase, polyhistidine (for example, six histidine at the amino and/or carboxyl terminus of the polypeptide), lacZ, green fluorescent protein (GFP), yeast α mating factor, GAL4 transcription activation or DNA binding domain, luciferase, and serum proteins such as ovalbumin, albumin and the constant domain of IgG. See, e.g., Godowski et al., 1988, and Ausubel et al., supra. Fusion proteins may also contain sites for specific enzymatic cleavage, such as a site that is recognized by enzymes such as Factor XIII, trypsin, pepsin, or any other enzyme known in the art. Fusion proteins will typically be made by either recombinant nucleic acid methods, as described above, chemically synthesized using techniques such as those described in Merrifield, 1963, herein incorporated by reference, or produced by chemical cross-linking.

[0199] Tagged fusion proteins permit easy localization, screening and specific binding via the epitope or enzyme tag. See Ausubel, 1991, Chapter 16. Some tags allow the protein of interest to be displayed on the surface of a phagemid, such as M13, which is useful for panning agents that may bind to the desired protein targets. Another advantage of fusion proteins is that an epitope or enzyme tag can simplify purification. These fusion proteins may be purified, often in a single step, by affinity chromatography. For example, a His⁶ tagged protein can be purified on a Ni affinity column and a GST fusion protein can be purified on a glutathione affinity column. Similarly, a fusion protein comprising the Fc domain of IgG can be purified on a Protein A or Protein G column and a fusion protein comprising an epitope tag such as myc can be purified using an immunoaffinity column containing an anti-c-myc antibody. It is preferable that the epitope tag be separated from the protein encoded by the nucleic acid molecule of the invention by an enzymatic cleavage site that can be cleaved after purification.

[0200] A second advantage of fusion proteins is that the epitope tag can be used to bind the fusion protein to a plate or column through an affinity linkage for screening targets.

[0201] Therefore, in another aspect, the invention provides a fusion protein comprising all or a part of a thioesterase derived from a daptomycin biosynthetic gene cluster and provides a nucleic acid molecule that encodes such a fusion protein. Another aspect provides a fusion protein comprising all or a part of a daptomycin NRPS or subunit thereof and provides a nucleic acid molecule encoding such a protein. See, e.g., Examples 11-16. The invention also provides a fusion protein comprising all or part of a polypeptide encoded by a nucleic acid molecule from any one of BAC clones B12:01G05, B12:06A12, B12:12F06, B12:18H04, B12:20C09 or B12:03A05. In a preferred embodiment, the fusion protein comprises all or a part of a polypeptide encoded by one or more of dptA, dptBC, dptD or dptH. In another preferred embodiment, the fusion protein comprises a polypeptide encoded by a nucleic acid molecule that selectively hybridizes to dptA, dptBC, dptD or dptH. In a more preferred embodiment, the fusion protein comprises a polypeptide having an amino acid sequence of SEQ ID NOS: 9, 11, 7 or 8, or comprises a polypeptide that is a fragment, mutein, homologous protein, derivative or analog thereof. In an even more preferred embodiment, the nucleic acid molecule encoding the fusion protein comprises all or part of the nucleic acid sequence of SEQ ID NOS: 10, 12, 3 or 6, or comprises all or part of a nucleic acid sequence that selectively hybridizes or is homologous to a nucleic acid molecule comprising said nucleic acid sequence. The invention also provides fusion proteins comprising polypeptide sequences encoded by an S. roseosporus nucleic acid sequence from any one of BAC clones B12:01G05, B12:06A12, B12:12F06, B12:18H04, B12:20C09 or B12:03A05, preferably from B12:03A05. The invention provides a fusion protein comprising a polypeptide having an amino acid sequence of SEQ ID NOS: 19, 21, 23, 25, 27, 29, 31, 33, 35, 37, 39, 41, 43, 45, 47, 49, 51, 53, 55, 57, 59, 61, 63, 65, 67, 69, 71, 73, 75, 77, 79, 81, 83, 85, 87, 89, 91, 93, 95, 97, 99, 101, 104, 108, 110, 112, 114, 116, 118, 120, 122, 124, 126, 128, 130, 132, 134 or 136, or comprising a polypeptide that is a fragment, mutein, homologous protein, derivative or analog thereof. The invention also provides a fusion protein comprising a polypeptide encoded by SEQ ID NOS: 20, 22, 24, 26, 28, 30, 32, 34, 36, 38, 40, 42, 44, 46, 48, 50, 52, 54, 56, 58, 60, 62, 64, 66, 68, 70, 72, 74, 76, 78, 80, 82, 84, 86, 88, 90, 92, 94, 96, 98, 100, 102, 105, 107, 109, 111, 113, 115, 117, 119, 121, 123, 125, 127, 129, 131, 133 or 135, or comprising all or part of a nucleic acid sequence that selectively hybridizes or is homologous to a nucleic acid molecule comprising said nucleic acid sequence.

[0202] In one aspect of the invention, the fusion protein that comprises all or a part of a thioesterase derived from a daptomycin biosynthetic gene cluster comprises other modules (including heterologous or hybrid modules) from a polypeptide involved in non-ribosomal protein synthesis. See, e.g., Examples 12E, G and H and Example 13. In another preferred embodiment, the fusion protein comprises one or more amino acid sequences that encode thioesterases, wherein the thioesterases may be identical to one another or may be different. See, e.g., Examples 11E-G (duplication of daptomycin thioesterase genes), Example 12 (producing modified NRPS thioesterase fusion proteins) and Example 13 (producing free thioesterase fusion proteins).

[0203] In another embodiment, the invention provides a fusion protein that is a hybrid of amino acid sequences from two or more different thioesterases and a nucleic acid molecule that encodes such a fusion protein. The hybrid fusion protein may consist of two, three or more portions of different thioesterases. The hybrid thioesterase may have a different or the same specificity.

[0204] Methods to Assay Thioesterase and Daptomycin NRPS Activity

[0205] There are a number of methods known in the art to determine whether a fragment, mutein, homologous protein, analog, derivative or fusion protein of a thioesterase has the same, enhanced or decreased biological activity as a wild-type thioesterase polypeptide. In one embodiment, a thioesterase assay which monitors cleavage of a suitable thioester bond and/or release of a corresponding product is performed in vitro. Any of a number of thioesterase assays well-known in the art may be used, including those which use photo- or radio-labeled substrates.

[0206] In a preferred embodiment, thioesterase activity associated with peptide synthesis by a NRPS is determined using cellular assays. For example, a nucleic acid molecule encoding a fragment, mutein, homologous protein or fusion protein may be introduced into a bacterial cell comprising a daptomycin biosynthetic gene cluster absent one or both of the thioesterase domains of dptD or dptH. Alternatively, the nucleic acid molecule may be introduced into a bacterial cell comprising a different biosynthetic gene cluster that produces a different compound, e.g., a different lipopeptide. In a preferred embodiment, the bacterial cell may be S. lividans. The nucleic acid molecule may be introduced into the bacterial cell by any method known in the art, including conjugation, transformation, electroporation, protoplast fusion or the like. The bacterial cell comprising the nucleic acid molecule is incubated under conditions in which the polypeptide encoded by the nucleic acid molecule is expressed. After incubation, the bacterial cells may be analyzed by, e.g., HPLC and/or LC/MS, to determine if the bacterial cells produce the desired lipopeptide. See, e.g., the method of expressing daptomycin described in Examples 7-9, infra. When the thioesterase activity is associated with synthesis of a peptide having an anti-cell growth property (e.g., an antibiotic, antifungal, antiviral or antimitotic agent) a desired assay known to those of skill in the art may be used.

[0207] Alternatively, a fragment, mutein, homologous protein, analog, derivative or fusion protein of a thioesterase may be introduced into a cell, particularly a bacterial cell, comprising a daptomycin biosynthetic gene cluster absent one or both of the thioesterase domain of dptD or dptH. After incubation, the bacterial cells may be analyzed by, e.g., HPLC and/or LC/MS, as described in Example 7, to determine if the bacterial cells produce the desired lipopeptide. The same method can be used with a cell comprising a different biosynthetic gene cluster that produces a different compound, e.g., a different lipopeptide.

[0208] In a preferred embodiment, a fragment, mutein, homologous protein, analog, derivative or fusion protein comprises an amino acid sequence comprising the GXSXG thioesterase motif (see Example 3). In a more preferred embodiment, a fragment, mutein, homologous protein, analog or derivative comprises an amino acid sequence comprising the thioesterase motif GWSFG or GTSLG, which are derived from SEQ ID NO: 7 and SEQ ID NO: 8, respectively.

[0209] Similar methods known in the art may be used to determine whether a fragment, mutein, homologous protein, analog, derivative or fusion protein of a daptomycin NRPS or subunit thereof has the same or different biological activity as a wild-type NRPS or subunit thereof.

[0210] Antibodies

[0211] The polypeptides encoded by the genes of this invention may be used to elicit polyclonal or monoclonal antibodies that bind to a polypeptide of this invention, as well as a fragment, mutein, homologous protein, analog, derivative or fusion protein thereof, using a variety of techniques well known to those of skill in the art. Antibodies directed against the polypeptides of this invention are immunoglobulin molecules or portions thereof that are immunologically reactive with the polypeptide of the present invention.

[0212] Antibodies directed against a polypeptide of the invention may be generated by immunization of a mammalian host. Such antibodies may be polyclonal or monoclonal. Preferably they are monoclonal. Methods to produce polyclonal and monoclonal antibodies are well known to those of skill in the art. For a review of such methods, see Harlow and Lane, Antibodies: A Laboratory Manual (1988) and Ausubel et al. supra, herein incorporated by reference. Determination of immunoreactivity with a polypeptide of the invention may be made by any of several methods well known in the art, including by immunoblot assay and ELISA.

[0213] Monoclonal antibodies with affinities of 10⁻⁸ M⁻¹ or preferably 10⁻⁹ to 10⁻¹⁰ M⁻¹ or stronger are typically made by standard procedures as described, e.g., in Harlow and Lane, 1988. Briefly, appropriate animals are selected and the desired immunization protocol followed. After the appropriate period of time, the spleens of such animals are excised and individual spleen cells fused, typically, to immortalized myeloma cells under appropriate selection conditions. Thereafter, the cells are clonally separated and the supernatants of each clone tested for their production of an appropriate antibody specific for the desired region of the antigen.

[0214] Other suitable techniques involve in vitro exposure of lymphocytes to the antigenic polypeptides, or alternatively, to selection of libraries of antibodies in phage or similar vectors. See Huse et al., 1989. The polypeptides and antibodies of the present invention may be used with or without modification. Frequently, polypeptides and antibodies will be labeled by joining, either covalently or non-covalently, a substance which provides for a detectable signal. A wide variety of labels and conjugation techniques are known and are reported extensively in both the scientific and patent literature. Suitable labels include radionuclides, enzymes, substrates, cofactors, inhibitors, fluorescent agents, chemiluminescent agents, magnetic particles and the like. Patents teaching the use of such labels include U.S. Pat. Nos. 3,817,837; 3,850,752; 3,939,350; 3,996,345; 4,277,437; 4,275,149 and 4,366,241, herein incorporated by reference. Also, recombinant immunoglobulins may be produced (see U.S. Pat. No. 4,816,567, herein incorporated by reference).

[0215] An antibody of this invention may also be a hybrid molecule formed from immunoglobulin sequences from different species (e.g., mouse and human) or from portions of immunoglobulin light and heavy chain sequences from the same species. An antibody may be a single-chain antibody or a humanized antibody. It may be a molecule that has multiple binding specificities, such as a bifunctional antibody prepared by any one of a number of techniques known to those of skill in the art including the production of hybrid hybridomas, disulfide exchange, chemical cross-linking, addition of peptide linkers between two monoclonal antibodies, the introduction of two sets of immunoglobulin heavy and light chains into a particular cell line, and so forth.

[0216] The antibodies of this invention may also be human monoclonal antibodies, for example those produced by immortalized human cells, by SCID-hu mice or other non-human animals capable of producing “human” antibodies, or by the expression of cloned human immunoglobulin genes. The preparation of humanized antibodies is taught by U.S. Pat. Nos. 5,777,085 and 5,789,554, herein incorporated by reference.

[0217] In sum, one of skill in the art, provided with the teachings of this invention, has available a variety of methods which may be used to alter the biological properties of the antibodies of this invention including methods which would increase or decrease the stability or half-life, immunogenicity, toxicity, affinity or yield of a given antibody molecule, or to alter it in any other way that may render it more suitable for a particular application.

[0218] In a preferred embodiment, an antibody of the present invention binds to a thioesterase involved in daptomycin synthesis or to a daptomycin NRPS or subunit thereof. In a more preferred embodiment, the antibody binds to a polypeptide encoded by dptA, dptBC, dptD or dptH, or to a fragment thereof. In another preferred embodiment, the antibody binds to a polypeptide encoded by a nucleic acid molecule that selectively hybridizes to dptA, dptBC, dptD or dptH. In a more preferred embodiment, the antibody binds to a polypeptide having an amino acid sequence of SEQ ID NOS: 9, 11, 7 or 8, or binds to a polypeptide that is fragment, mutein, homologous protein, derivative, analog or fusion protein thereof. In an even more preferred embodiment, the antibody binds to a polypeptide encoded by a nucleic acid molecule comprising all or part of the nucleic acid sequence of SEQ ID NOS: 10, 12, 3 or 6. In another embodiment, the antibody binds to a polypeptide encoded by a nucleic acid molecule that comprises all or part of a nucleic acid sequence that selectively hybridizes or is homologous to a nucleic acid molecule comprising a nucleic acid sequence of SEQ ID NOS: 10, 12, 3 or 6.

[0219] The invention provides an antibody that selectively binds to a polypeptide encoded by an S. roseosporus nucleic acid sequence from any one of BAC clones B12:01G05, B12:06A12, B12:12F06, B12:18H04, B12:20C09 or B12:03A05, preferably from B12:03A05. The polypeptide may comprise an amino acid sequence selected from SEQ ID NOS: 19, 21, 23, 25, 27, 29, 31, 33, 35, 37, 39, 41, 43, 45, 47, 49, 51, 53, 55, 57, 59, 61, 63, 65, 67, 69, 71, 73, 75, 77, 79, 81, 83, 85, 87, 89, 91, 93, 95, 97, 99, 101, 104, 108, 110, 112, 114, 116, 118, 120, 122, 124, 126, 128, 130, 132, 134 or 136 or is encoded by a nucleic acid sequence SEQ ID NOS: 20, 22, 24, 26, 28, 30, 32, 34, 36, 38, 40, 42, 44, 46, 48, 50, 52, 54, 56, 58, 60, 62, 64, 66, 68, 70, 72, 74, 76, 78, 80, 82, 84, 86, 88, 90, 92, 94, 96, 98, 100, 102, 105, 107, 109, 111, 113, 115, 117, 119, 121, 123, 125, 127, 129, 131, 133 or 135. Preferably, the antibody selectively binds to a polypeptide comprising an amino acid sequence selected from SEQ ID NOS: 23, 25, 27, 29, 33, 35, 37, 91, 93, 97, 99, 110 or 112 or from SEQ ID NOS: 61, 65, 69, 79, 81, 83, 85, 87, 95 and 101. The invention also provides an antibody that selectively binds to a fragment, mutein, homologous protein, derivative, analog or fusion protein thereof.

[0220] Computer Readable Means

[0221] A further aspect of the invention is a computer readable means for storing the nucleic acid and amino acid sequences of the instant invention. In a preferred embodiment, the invention provides a computer readable means for storing all of the nucleic acid and amino acid sequences described herein, as the complete set of sequences or in any combination. The records of the computer readable means can be accessed for reading and display and for interface with a computer system for the application of programs allowing for the location of data upon a query for data meeting certain criteria, the comparison of sequences, the alignment or ordering of sequences meeting a set of criteria, and the like.

[0222] The nucleic acid and amino acid sequences of the invention are particularly useful as components in databases useful for search analyses as well as in sequence analysis algorithms. As used herein, the terms “nucleic acid sequences of the invention” and “amino acid sequences of the invention” mean any detectable chemical or physical characteristic of a polynucleotide or polypeptide of the invention that is or may be reduced to or stored in a computer readable form. These include, without limitation, chromatographic scan data or peak data, photographic data or scan data therefrom, and mass spectrographic data.

[0223] This invention provides computer readable media having stored thereon sequences of the invention. A computer readable medium may comprise one or more of the following: a nucleic acid sequence comprising a sequence of a nucleic acid sequence of the invention; an amino acid sequence comprising an amino acid sequence of the invention; a set of nucleic acid sequences wherein at least one of said sequences comprises the sequence of a nucleic acid sequence of the invention; a set of amino acid sequences wherein at least one of said sequences comprises the sequence of an amino acid sequence of the invention; a data set representing a nucleic acid sequence comprising the sequence of one or more nucleic acid sequences of the invention; a data set representing a nucleic acid sequence encoding an amino acid sequence comprising the sequence of an amino acid sequence of the invention; a set of nucleic acid sequences wherein at least one of said sequences comprises the sequence of a nucleic acid sequence of the invention; a set of amino acid sequences wherein at least one of said sequences comprises the sequence of an amino acid sequence of the invention; a data set representing a nucleic acid sequence comprising the sequence of a nucleic acid sequence of the invention; a data set representing a nucleic acid sequence encoding an amino acid sequence comprising the sequence of an amino acid sequence of the invention. The computer readable medium can be any composition of matter used to store information or data, including, for example, commercially available floppy disks, tapes, hard drives, compact disks, and video disks.

[0224] Also provided by the invention are methods for the analysis of character sequences, particularly genetic sequences. Preferred methods of sequence analysis include, for example, methods of sequence homology analysis, such as identity and similarity analysis, RNA structure analysis, sequence assembly, cladistic analysis, sequence motif analysis, open reading frame determination, nucleic acid base calling, and sequencing chromatogram peak analysis.

[0225] A computer-based method is provided for performing nucleic acid homology identification. This method comprises the steps of providing a nucleic acid sequence comprising the sequence a nucleic acid of the invention in a computer readable medium; and comparing said nucleic acid sequence to at least one nucleic acid or amino acid sequence to identify homology.

[0226] A computer-based method is also provided for performing amino acid homology identification, said method comprising the steps of: providing an amino acid sequence comprising the sequence of an amino acid of the invention in a computer readable medium; and comparing said an amino acid sequence to at least one nucleic acid or an amino acid sequence to identify homology.

[0227] A computer based method is still further provided for assembly of overlapping nucleic acid sequences into a single nucleic acid sequence, said method comprising the steps of: providing a first nucleic acid sequence comprising the sequence of a nucleic acid of the invention in a computer readable medium; and screening for at least one overlapping region between said first nucleic acid sequence and a second nucleic acid sequence.

[0228] Methods of Using Nucleic Acid Molecules as Probes and Primers

[0229] In one embodiment, a nucleic acid molecule of the invention may be used as a probe or primer to identify or amplify a nucleic acid molecule that selectively hybridizes to the nucleic acid molecule. In a preferred embodiment, the probe or primer is derived from a nucleic acid molecule encoding a daptomycin NRPS, subunit thereof or thioesterase from a daptomycin biosynthetic gene cluster. The probe or primer may also be derived from an expression control sequence derived from a daptomycin NRPS or thioesterase gene of a daptomycin biosynthetic gene cluster. In a preferred embodiment, the probe or primer is derived from dptA, dptBC, dptD or dptH. In a more preferred embodiment, the probe or primer is derived from a nucleic acid molecule that encodes a polypeptide having an amino acid sequence of SEQ ID NOS: 9, 11, 7 or 8. In a yet more preferred embodiment, the probe or primer is derived from a nucleic acid molecule that has a nucleic acid sequence of SEQ ID NOS: 20, 22, 24, 26, 28, 30, 32, 34, 36, 38, 40, 42, 44, 46, 48, 50, 52, 54, 56, 58, 60, 62, 64, 66, 68, 70, 72, 74, 76, 78, 80, 82, 84, 86, 88, 90, 92, 94, 96, 98, 100, 102, 105, 107, 109, 111, 113, 115, 117, 119, 121, 123, 125, 127, 129, 131, 133 or 135. In another embodiment, the probe or primer is derived from a nucleic acid sequence that encodes SEQ ID NOS: 19, 21, 23, 25, 27, 29, 31, 33, 35, 37, 39, 41, 43, 45, 47, 49, 51, 53, 55, 57, 59, 61, 63, 65, 67, 69, 71, 73, 75, 77, 79, 81, 83, 85, 87, 89, 91, 93, 95, 97, 99, 101, 104, 108, 110, 112, 114, 116, 118, 120, 122, 124, 126, 128, 130, 132, 134 or 136.

[0230] In general, a probe or primer is at least 10 nucleotides in length, more preferably at least 12, more preferably at least 14 and even more preferably at least 16 nucleotides in length. In an even more preferred embodiment, the probe or primer is at least 18 nucleotides in length, even more preferably at least 20 nucleotides and even more preferably at least 22 nucleotides in length. Primers and probes may also be longer in length. For instance, a probe or primer may be 25 nucleotides in length, or may be 30, 40 or 50 nucleotides in length. Methods of performing nucleic acid hybridization using oligonucleotide probes are well-known in the art. See, e.g., Sambrook et al., supra. See, e.g., Chapter 11 and pages 11.31-11.32 and 11.40-11.44, which describes radiolabeling of short probes, and pages 11.45-11.53, which describes hybridization conditions for oligonucleotide probes, including specific conditions for probe hybridization (pages 11.50-11.51). Methods of performing PCR using primers are also well-known in the art. See, e.g., Sambrook et al., supra and Ausubel et al., supra. PCR methods may be used to identify and/or isolate allelic variants and fragments of the nucleic acid molecules of the invention; PCR may also be used to identify and/or isolate nucleic acid molecules that hybridize to the primers and that may be amplified, and may be used to isolate nucleic acid molecules that encode homologous proteins, analogs, fusion protein or muteins of the invention.

[0231] Methods of Using Thioesterases for Biosynthesis of Compounds—Manipulations of Dpt Genes

[0232] Genes of the daptomycin biosynthetic gene cluster of the invention may be manipulated in a variety of ways to produce new biosynthetic peptide products or to alter the regulation of one or more genes expressed from the gene cluster. See, e.g., FIG. 1.

[0233] Disruption of a Gene Encoding a Thioesterase

[0234] In one aspect, the invention provides a method of disrupting or deleting a gene encoding a thioesterase that is involved in a NRPS or PKS pathway in a bacterial cell. Preferably, the method comprises the step of disrupting or deleting a gene or portion thereof that encodes a thioesterase in a daptomycin biosynthetic gene cluster. Disruption or deletion of a gene encoding an integral thioesterase would be likely to result in the production of compounds that are intermediates to the final product. In one aspect, a gene or portion thereof encoding an integral thioesterase may be disrupted or deleted. In a preferred embodiment, disruption or deletion of a gene encoding an integral thioesterase of the daptomycin biosynthetic gene cluster in S. roseosporus would produce a linear lipopeptide compound. The linear lipopeptide compound may be used directly if its release from the NRPS were to be catalyzed by a different endogenous or exogenously provided thioesterase activity within the host cell. Such linear lipopeptide compounds, if not released from the NRPS by an endogenous thioesterase activity, may be useful intermediates for testing potential but as yet unidentified thioesterase polypeptides or for testing thioesterase fusion, fragment, mutein, derivative, analog or homolog polypeptides for activity. The linear lipopeptide compound may alternatively be used as an intermediate for production of novel lipopeptides.

[0235] In another aspect, a gene encoding a free thioesterase may be disrupted or deleted in a bacterial cell comprising an NRPS. Because free thioesterases are thought to be involved in proofreading of the peptide compounds produced in NRPS, disruption or deletion of a gene encoding a free thioesterase may lead to the production of compounds that have mutations compared to the compound produced in the presence of the free thioesterase. These mutated compounds may be used to generate novel lipopeptides. See, e.g., Example 13.

[0236] In a preferred embodiment, the method comprises the step of disrupting or deleting the thioesterase-encoding portion of dptD or disrupting or deleting dptH in a daptomycin biosynthetic gene cluster. In an even more preferred embodiment, the method comprises the step of disrupting or deleting a gene encoding a thioesterase having an amino acid sequence of the thioesterase domain of SEQ ID NO: 7 or having the amino acid sequence of SEQ ID NO: 8. The invention also comprises a method of disrupting or deleting a gene encoding a thioesterase wherein the gene is one that selectively hybridizes or is homologous to a gene encoding a thioesterase having an amino acid sequence of the thioesterase domain of SEQ ID NO: 7 or the amino acid sequence of SEQ ID NO: 8. In another preferred embodiment, disruption or deletion of a thioesterase may be combined with the methods of altering the gene cluster involved in non-ribosomal peptide synthesis, as described below.

[0237] Disruption of a gene encoding a thioesterase may be accomplished by any method known to one having ordinary skill in the art following the teachings of the instant specification. In a preferred embodiment, disruption of a gene encoding a thioesterase may be accomplished by targeted gene disruption using methods taught, e.g., in Hosted and Baltz, J. Bacteriol., 179, pp. 180-186 (1997); Butler et al., Chem. Biol., 6, pp. 287-292 (1999); and Xue et al., Proc. Natl. Acad. Sci. U.S.A., 95, pp. 12111-12116 (1998), each of which is incorporated herein by reference in its entirety. See, e.g., Example 11.

[0238] Alteration of Site of Cyclization and Cyclic Peptide Produced Using Thioesterases

[0239] In a naturally-occurring polypeptide involved in NRPS, an integral thioesterase is located at the carboxy-terminus of the polypeptide, where it is involved in product cyclization. In one aspect, the invention provides a method to alter the site of cyclization of a cyclic peptide (or release of a linear peptide) by changing the location of a module encoding a thioesterase. In one embodiment, the site of cyclization may be altered by inserting the module encoding the thioesterase into the gene encoding the polypeptide involved in NRPS in a region that is upstream of the region in which the thioesterase module naturally occurs. In this embodiment, the cyclic peptide that is produced will be smaller than the naturally-occurring cyclic peptide. See, e.g., Example 12.

[0240] In a preferred embodiment, the module encodes an integral thioesterase from a daptomycin biosynthetic gene cluster. In a more preferred embodiment, the module comprises the thioesterase domain of DptD. In an even more preferred embodiment, the module encodes a polypeptide having all or a portion of the amino acid sequence of SEQ ID NO: 7, preferably a portion of SEQ ID NO: 7 that comprises the thioesterase domain. In another preferred embodiment, the module comprises a nucleic acid molecule that is homologous to or selectively hybridizes to a nucleic acid molecule encoding all or a portion of the thioesterase domain of SEQ ID NO: 7 or to a nucleic acid molecule encoding the thioesterase domain that comprises all or a portion of the nucleic acid sequence of SEQ ID NO: 3.

[0241] Alternatively, other modules that are involved in adding amino acids to the peptide (or otherwise modifying amino acids within the peptide) may be inserted upstream of the module encoding the thioesterase. See, e.g., Example 12. Such modules include a minimal module comprising at least an adenylation domain and a thiolation or acyl carrier domain. In a preferred embodiment, the inserted module would also include a condensation domain. Additional domains may also be inserted upstream of the thioesterase module including an M domain, an E domain and/or a Cy domain. The type of module(s) that would be inserted upstream of the thioesterase domain would depend upon the type of amino acid residues that were desired. Methods of inserting modules that will add and/or modify a specific amino acid are well known in the art. See, e.g., Mootz et al., Curr. Opin. Biotechnol., 10, pp. 341-348 (1999), herein incorporated by reference in its entirety. Addition of one or more modules upstream of the thioesterase will produce a polypeptide involved in NRPS that is capable of synthesizing a cyclic peptide that is larger and that may contain different amino acid residues than the naturally-occurring cyclic peptide.

[0242] In Vivo Use of Thioesterases

[0243] Another use of the genes of the present invention is to improve the yield of a product in a cell expressing an NRPS. See, e.g., Example 11. Nucleic acid molecules that may be used to increase yield include nucleic acid molecules that encode positive regulatory factors, acyl CoA thioesterase, ABC transporters, NovABC-related polypeptides, DptA, DptBC, DptD, polypeptides that encode daptomycin resistance and daptomycin thioesterases, including DptD and DptH. The complete daptomycin biosynthetic gene cluster, daptomycin NRPS or any domain or subunit thereof may also be duplicated. In a preferred embodiment, a free and/or an integral thioesterase from a daptomycin biosynthetic gene cluster are introduced into a cell to improve production of daptomycin. In another preferred embodiment, the additional copies of a thioesterase may be introduced into a cell comprising altered NRPS polypeptides, as described supra. Without wishing to be bound by any theory, additional copies of a free and/or an integral thioesterase may improve the NRPS processing of the peptide by increasing the proofreading capacity (e.g., the free thioesterase) or the cyclization and/or peptide release capacity (e.g., the integral thioesterase) of the bacterial cell.

[0244] In a preferred embodiment, additional copies of a nucleic acid molecule encoding thioesterase may be introduced into a cell. See, e.g., Example 11. Introduction of the thioesterase may be performed by any method known in the art. In a more preferred embodiment, the additional copies of the gene are under the regulatory control of strong expression control sequences. These sequences may be derived from another thioesterase gene or may be derived from heterologous sequences, as described supra. Further, a nucleic acid molecule encoding a thioesterase may be introduced into a cell such that it is expressed as a separate polypeptide. This may be especially useful for a free thioesterase. Alternatively, a nucleic acid molecule encoding a thioesterase may be introduced into a cell such that it forms part of a multi-domain protein. This can be accomplished, e.g., by homologous recombination into a polypeptide which forms or interacts with an NRPS. This may be especially useful, although not required, for an integral thioesterase.

[0245] In another embodiment, copies of a free and/or an integral thioesterase may be introduced into a cell that expresses a NRPS complex that is other than a daptomycin biosynthetic gene cluster. See, e.g., Example 13. In one preferred embodiment, the complex is a NRPS complex. In another preferred embodiment, the complex is a PKS complex or a mixed PKS/NRPS complex. Numerous PKS and NRPS complexes are known in the art. See, e.g., complexes that produce vancomycin, bleomycin, A54145, CDA, amphomycin, echinocandin, cyclosporin, erythromycin, tylosin, monensin, avermectin, penicillin, cephalosporin, pristinamycins, erythromycin, rapamycin, spinosyn, didemnin, discobahamian, and epothilone. As described above, addition of a free and/or an integral thioesterase may improve the NRPS or PKS processing of a peptide by increasing the proofreading capacity (the free thioesterase) or the cyclization capacity (the integral thioesterase) of the bacterial cell. Addition of a free and/or integral thioesterase may be achieved by the methods described above.

[0246] In a preferred embodiment, a nucleic acid molecule encoding a thioesterase that is introduced into a cell is a thioesterase from a daptomycin biosynthetic gene cluster. In a preferred embodiment, the gene is the thioesterase-encoding domain of dptD or is dptH. More preferably, the nucleic acid molecule encodes a thioesterase having an amino acid sequence of the thioesterase domain of SEQ ID NO: 7 or SEQ ID NO: 8, or is a homologous protein, fusion protein, mutein, derivative, analog or fragment thereof having thioesterase activity.

[0247] Methods of Altering Gene Clusters for Production of Novel Compounds by NRPS

[0248] Alteration of NRPS Polypeptide Modules and Domains

[0249] In another aspect, the invention provides a method of altering the number or position of the modules in an NRPS. In one embodiment, one or more modules may be deleted from the NRPS. These deletions will result in synthesis by the NRPS of a peptide product that is shorter than the naturally-occurring one. In another embodiment, one or more domains may be deleted from the NRPS. In this case, the product produced by the NRPS will have a chemical change relative to the peptide produced in the absence of the deletion, e.g., if an epimerization and/or methylation domain is deleted.

[0250] In another embodiment, one or more modules or domains may be added to the NRPS. In this case, the peptide synthesized by the NRPS will be longer than the naturally-occurring one or will have an additional chemical change, respectively. For instance, if an epimerization domain or a methylation domain is added, the resultant peptide will contain an extra D-amino acid or will contain a methylated amino acid, respectively. In a yet further embodiment, one or more modules may be mutated, e.g., an adenylation domain may be mutated such that it has a different amino acid specificity than the naturally-occurring adenylation domain. The amino acid pocket code for the daptomycin NRPS—which determines which amino acid will bind within each adenylation domain of modules 1-13—is described in Example 5; see also Table 2. With the amino acid code in hand, one of skill in the art can perform mutagenesis, by a variety of well known techniques, to exchange the code in one module for another code, thus altering the ultimate amino acid composition and/or sequence of the resulting peptide synthesized by the altered NRPS. See, e.g., Example 12A. In another embodiment, one or more subunits may be added or deleted to the NRPS.

[0251] In a still further embodiment, one or more domains, modules or subunits may be substituted with another domain, module or subunit in order to produce novel peptides by complementation. In this case, the peptide produced by the altered NRPS will have, e.g., one or more different amino acids compared to the naturally-occurring peptide. In addition, different combinations of insertions, deletions, substitutions and mutations of domains, modules or subunits may be used to produce a peptide of interest. For instance, one may substitute a modified module, domain or subunit for a naturally-occurring one, or may substitute a naturally-occurring module, domain or subunit from the NRPS from one organism for a module, domain or subunit of an NRPS from another organism. See, e.g., Example 12C. Modifications of the modules, domains and subunits may be performed by site-directed mutagenesis, domain exchange (for module or subunit modification), deletion, insertion or substitution of a domain in a module or subunit, or deletion, insertion or substitution of a module in a subunit. Further, a domain, module or subunit may be disrupted such that it does not function using any method known in the art. These disruptions include, e.g., such techniques as a single crossover disruptant or replacement through homologous recombination by another gene (e.g., a gene that permits selection or screening).

[0252] The products produced by the modified NRPS complexes will have different incorporated amino acids, different chemical alterations of the amino acids (e.g., methylation and epimerization) and may be shorter or longer than the native lipopeptides. The domains, modules or subunits may be derived from any number of NRPS desired, including two, three or four NRPS. Further, the invention contemplates these altered NRPS complexes with and without an integral thioesterase domain. See, e.g., Example 12B-J.

[0253] The source of the modules, domains and/or subunits may be derived from the daptomycin biosynthetic gene cluster NRPS or may be derived from the NRPS that encodes another lipopeptide or other peptide source. These peptide sources include glycopeptide gene clusters, mixed pathway gene clusters and siderophore gene clusters. Further, the source of the modules, domains and/or subunits may be obtained from any appropriate source, including both streptomycete and non-streptomycete sources. Non-streptomycete sources include actinomycetes, e.g., Amycolatopsis; prokaryotic non-actinomycetes, e.g., Bacillus and cyanobacteria; and non-bacterial sources, e.g., fungi.

[0254] An NRPS or portion thereof may be heterologous to a host cell of interest or may be endogenous to the host cell. In one embodiment, the daptomycin NRPS or a portion thereof (e.g., a domain, module or subunit thereof) is introduced into the host cell on any vector known to one having ordinary skill in the art, e.g., a plasmid, a cosmid, bacteriophage or BAC. The host cell into which the daptomycin NRPS or portion thereof is introduced may contain an endogenous NRPS or portion thereof (e.g., a domain, module or subunit thereof). Alternatively, a heterologous NRPS or portion thereof may be introduced into the host cell containing the heterologous daptomycin NRPS or portion thereof. The daptomycin NRPS, other NRPS, or domain, module or subunit of an NRPS may have either a naturally-occurring sequence or a modified sequence. In another embodiment, the daptomycin NRPS or portion thereof is endogenous to the host cell, e.g., the host cell is S. roseosporus. A naturally-occuring or modified NRPS, or a domain, module or subunit thereof may be introduced into the host cell comprising the daptomycin NRPS or portion thereof. The heterologous domains, modules, subunits or NRPS may comprise a constitutive or regulatable promoter, which are known to those having ordinary skill in the art. The promoter can be either homologous or heterologous to the nucleic acid moleucle being introduced into the cell. In one embodiment, the promoter may be from the daptomycin biosynthetic gene cluster, as described above.

[0255] The nucleic acid molecule comprising the NRPS or portion thereof (e.g., a domain, module or subunit) may be maintained episomally or integrated into the genome. The nucleic acid molecule may be introduced into the genome at, e.g., phage integration sites. Further, the nucleic acid molecule may be introduced into the genome at the site of an endogenous or heterologous NRPS or portion thereof or elsewhere in the genome. The nucleic acid molecule may be introduced in such a way to disrupt all or part of the function of a domain, module or subunit of an NRPS already present in the genome, or may be introduced in a manner that does not disturb the function of the NRPS or portion thereof.

[0256] The peptides produced by these NRPS may be useful as new compounds or may be useful in producing new compounds. In a preferred embodiment, the new compounds are useful as or may be used to produce antibiotic compounds. In another preferred embodiment, the new compounds are useful as or may be used to produce other peptides having useful activities, including but not limited to antibiotic, antifungal, antiviral, antiparasitic, antimitotic, cytostatic, antitumor, immuno-modulatory, anti-cholesterolemic, siderophore, agrochemical (e.g., insecticidal) or physicochemical (e.g., surfactant) properties. In a more preferred embodiment, the compounds produced using an altered NRPS polypeptide may be used in the synthesis of daptomycin-related compounds, including those described in U.S. application Ser. Nos. 09/738,742, 09/737,908 and 09/739,535, filed Dec. 15, 2000.

[0257] In addition, diverse variants of non-ribosomally synthesized peptides and polyketides may be achieved by altering the pools of available substrates during host cell cultivation. Commercial production of daptomycin, for example, is the result of cultivating the daptomycin producer Streptomyces roseosporus in the presence of decanoic acid, which alters the lipopeptide profile of the final products. See, e.g., U.S. Pat. No. 4,885,243. The feeding of N-acetyl cysteamine (SNAC) analogs of polyketide intermediates resulted in substantial increases in incorporation of the intermediates into the polyketide, when compared to the free carboxylic acid or ester analogs. See, e.g., Yue et al., J. Am. Chem. Soc., 109, pp. 1253-1255 (1987); Cane and Yang, J. Am. Chem. Soc., 109, 1255-1257 (1987); Cane et al., J. Am. Chem. Soc., 115, pp. 522-526 and 527-535 (1993); Cane et al., J. Am. Chem. Soc., 117, pp. 633-634 (1995); Pieder et al., J. Am. Chem. Soc., 117, pp. 11373-11374 (1995); each of which is incorporated herein by reference in its entirety. SNAC analogs of amino acids have been incorporated into a NRPS in vitro. Ehmann et al., Chem. Biol., 7, pp. 765-772 (2000). Thus it should be possible to feed SNAC or other pantetheine mimics to incorporate unnatural substrates into a NRPS-produced peptide.

[0258] Further diversity of non-ribosomally synthesized peptides and polyketides may also be achieved by expressing one or more NRPS and PKS genes (encoding natural, hybrid or otherwise altered modules or domains) in heterologous host cells, i.e., in host cells other than those from which the NRPS and PKS genes or modules originated.

[0259] In addition, one may express an ABC transporter or other polypeptide involved in antibiotic resistance in order to increase the resistance of a bacterial cell to daptomycin or a related compound. The ABC transporter may be overexpressed in an autologous cell (i.e., a cell that comprises the gene) or may be expressed in a heterologous cell (i.e., a cell that normally does not have the gene). Further, one may express an ABC transporter gene of the invention or another polypeptide involved in antibiotic resistance described herein in order to be able to select cells that are resistant to daptomycin. This selection may be useful for determining mechanisms of daptomycin resistance or may be used in standard molecular biological techniques in which antibody resistance is selected for.

[0260] Compounds of the Invention, Pharmaceutical Compositions Thereof and Methods of Treating Using Compounds and Compositions

[0261] Another object of the instant invention is to provide peptides or lipopeptides that may be produced by using the thioesterases, an NRPS or subunits thereof of the instant invention, as well as salts, esters, amides, ethers and protected forms thereof, and pharmaceutical formulations comprising these peptides, lipopeptides or their salts. In a preferred embodiment, the lipopeptide is daptomycin or a daptomycin-related lipopeptide, as described supra.

[0262] One may determine whether a peptide, lipopeptide or other compound of this invention has antibiotic activity using any of a variety of routine and well-known protocols in the art. One may use either an isolated or purified compound or may use an unpurified compound that is present in, e.g., fermentation culture broth or in a cell lysate. One may use either or both a gram-positive or a gram-negative bacterial test strain, and may use a variety of test strains to determine efficacy. In a preferred embodiment, the bacterial test strain will be a gram-positive test strain. In a more preferred embodiment, the bacterial test strain will be a Staphylococcus, more preferably S. aureus. An example of methods that can be used to determine antibiotic activity are provided in U.S. Pat. Nos. 4,208,408 and 4,537,717. One having ordinary skill in the art will recognize that other potential antibiotics and other test strains may be used.

[0263] Peptides, lipopeptides or pharmaceutically acceptable salts thereof can be formulated for oral, intravenous, intramuscular, subcutaneous, aerosol, topical or parenteral administration for the therapeutic or prophylactic treatment of diseases, particularly bacterial infections. In a preferred embodiment, the lipopeptide is daptomycin or a daptomycin-related lipopeptide. Reference herein to “daptomycin,” “daptomycin-related lipopeptide” or “lipopeptide” includes pharmaceutically acceptable salts thereof. Peptides, including daptomycin or daptomycin-related lipopeptides, can be formulated using any pharmaceutically acceptable carrier or excipient that is compatible with the peptide or with the lipopeptide of interest. See, e.g., Handbook of Pharmaceutical Additives: An International Guide to More than 6000 Products by Trade Name, Chemical, Function, and Manufacturer, Ashgate Publishing Co., eds., M. Ash and I. Ash, 1996; The Merck Index: An Encyclopedia of Chemicals, Drugs and Biologicals, ed. S. Budavari, annual; Remington's Pharmaceutical Sciences, Mack Publishing Company, Easton, Pa.; Martindale: The Complete Drug Reference, ed. K. Parfitt, 1999; and Goodman & Gilman's The Pharmaceutical Basis of Therapeutics, Pergamon Press, New York, N.Y., ed. L. S. Goodman et al.; the contents of which are incorporated herein by reference, for a general description of the methods for administering various antimicrobial agents for human therapy. Peptides or lipopeptides of this invention can be mixed with conventional pharmaceutical carriers and excipients and used in the form of tablets, capsules, elixirs, suspensions, syrups, wafers, creams and the like. Peptides or lipopeptides may be mixed with other therapeutic agents and antibiotics, such as discussed herein. The compositions comprising a compound of this invention will contain from about 0.1 to about 90% by weight of the active compound, and more generally from about 10 to about 30%.

[0264] The compositions of the invention can be delivered using controlled (e.g., capsules) or sustained release delivery systems (e.g., bioerodable matrices). Exemplary delayed release delivery systems for drug delivery that are suitable for administration of the compositions of the invention are described in U.S. Pat. Nos. 4,452,775 (issued to Kent), 5,239,660 (issued to Leonard), 3,854,480 (issued to Zaffaroni).

[0265] The compositions may contain common carriers and excipients, such as corn starch or gelatin, lactose, sucrose, microcrystalline cellulose, kaolin, mannitol, dicalcium phosphate, sodium chloride and alginic acid. The compositions may contain croscarmellose sodium, microcrystalline cellulose, corn starch, sodium starch glycolate and alginic acid.

[0266] Tablet binders that can be included are acacia, methylcellulose, sodium carboxymethylcellulose, polyvinylpyrrolidone (Povidone), hydroxypropyl methylcellulose, sucrose, starch and ethylcellulose.

[0267] Lubricants that can be used include magnesium stearate or other metallic stearates, stearic acid, silicone fluid, talc, waxes, oils and colloidal silica.

[0268] Flavoring agents such as peppermint, oil of wintergreen, cherry flavoring or the like can also be used. It may also be desirable to add a coloring agent to make the dosage form more aesthetic in appearance or to help identify the product.

[0269] For oral use, solid formulations such as tablets and capsules are particularly useful. Sustained release or enterically coated preparations may also be devised. For pediatric and geriatric applications, suspensions, syrups and chewable tablets are especially suitable. For oral administration, the pharmaceutical compositions are in the form of, for example, a tablet, capsule, suspension or liquid. The pharmaceutical composition is preferably made in the form of a dosage unit containing a therapeutically-effective amount of the active ingredient. Examples of such dosage units are tablets and capsules. For therapeutic purposes, the tablets and capsules which can contain, in addition to the active ingredient, conventional carriers such as binding agents, for example, acacia gum, gelatin, polyvinylpyrrolidone, sorbitol, or tragacanth; fillers, for example, calcium phosphate, glycine, lactose, maize-starch, sorbitol, or sucrose; lubricants, for example, magnesium stearate, polyethylene glycol, silica, or talc; disintegrants, for example, potato starch, flavoring or coloring agents, or acceptable wetting agents. Oral liquid preparations generally are in the form of aqueous or oily solutions, suspensions, emulsions, syrups or elixirs may contain conventional additives such as suspending agents, emulsifying agents, non-aqueous agents, preservatives, coloring agents and flavoring agents. Oral liquid preparations may comprise lipopeptide micelles or monomeric forms of the lipopeptide. Examples of additives for liquid preparations include acacia, almond oil, ethyl alcohol, fractionated coconut oil, gelatin, glucose syrup, glycerin, hydrogenated edible fats, lecithin, methyl cellulose, methyl or propyl para-hydroxybenzoate, propylene glycol, sorbitol, or sorbic acid.

[0270] For intravenous (IV) use, a water soluble form of the peptide or lipopeptide can be dissolved in any of the commonly used intravenous fluids and administered by infusion. Intravenous formulations may include carriers, excipients or stabilizers including, without limitation, calcium, human serum albumin, citrate, acetate, calcium chloride, carbonate, and other salts. Intravenous fluids include, without limitation, physiological saline or Ringer's solution. Peptides or lipopeptides also may be placed in injectors, cannulae, catheters and lines.

[0271] Formulations for parenteral administration can be in the form of aqueous or non-aqueous isotonic sterile injection solutions or suspensions. These solutions or suspensions can be prepared from sterile powders or granules having one or more of the carriers mentioned for use in the formulations for oral administration. Lipopeptide micelles may be particularly desirable for parenteral administration. The compounds can be dissolved in polyethylene glycol, propylene glycol, ethanol, corn oil, benzyl alcohol, sodium chloride, and/or various buffers. For intramuscular preparations, a sterile formulation of a lipopeptide compound or a suitable soluble salt form of the compound, for example the hydrochloride salt, can be dissolved and administered in a pharmaceutical diluent such as Water-for-Injection (WFI), physiological saline or 5% glucose.

[0272] Injectable depot forms may be made by forming microencapsulated matrices of the compound in biodegradable polymers such as polylactide-polyglycolide. Depending upon the ratio of drug to polymer and the nature of the particular polymer employed, the rate of drug release can be controlled. Examples of other biodegradable polymers include poly(orthoesters) and poly(anhydrides). Depot injectable formulations are also prepared by entrapping the drug in microemulsions that are compatible with body tissues.

[0273] For topical use the compounds of the present invention can also be prepared in suitable forms to be applied to the skin, or mucus membranes of the nose and throat, and can take the form of creams, ointments, liquid sprays or inhalants, lozenges, or throat paints. Such topical formulations further can include chemical compounds such as dimethylsulfoxide (DMSO) to facilitate surface penetration of the active ingredient. For topical preparations, a sterile formulation of daptomycin, daptomycin-related lipopeptide or suitable salt forms thereof, may be administered in a cream, ointment, spray or other topical dressing. Topical preparations may also be in the form of bandages that have been impregnated with daptomycin or a daptomycin-related lipopeptide composition.

[0274] For application to the eyes or ears, the compounds of the present invention can be presented in liquid or semi-liquid form formulated in hydrophobic or hydrophilic bases as ointments, creams, lotions, paints or powders.

[0275] For rectal administration the compounds of the present invention can be administered in the form of suppositories admixed with conventional carriers such as cocoa butter, wax or other glycerides.

[0276] For aerosol preparations, a sterile formulation of the peptide or lipopeptide or salt form of the compound may be used in inhalers, such as metered dose inhalers, and nebulizers. A sterile formulation of a lipopeptide micelle may also be used for aerosol preparation. Aerosolized forms may be especially useful for treating respiratory infections, such as pneumonia and sinus-based infections.

[0277] Alternatively, the compounds of the present invention can be in powder form for reconstitution in the appropriate pharmaceutically acceptable carrier at the time of delivery. In one embodiment, the unit dosage form of the compound can be a solution of the compound or a salt thereof, in a suitable diluent in sterile, hermetically sealed ampules. The concentration of the compound in the unit dosage may vary, e.g. from about 1 percent to about 50 percent, depending on the compound used and its solubility and the dose desired by the physician. If the compositions contain dosage units, each dosage unit preferably contains from 50-500 mg of the active material. For adult human treatment, the dosage employed preferably ranges from 100 mg to 3 g, per day, depending on the route and frequency of administration.

[0278] In a further aspect, this invention provides a method for treating an infection, especially those caused by gram-positive bacteria, in humans and other animals. The term “treating” is used to denote both the prevention of an infection and the control of an established infection after the host animal has become infected. An established infection may be one that is acute or chronic. The method comprises administering to the human or other animal an effective dose of a compound of this invention. An effective dose of daptomycin, for example, is generally between about 0.1 and about 25 mg/kg daptomycin, daptomycin-related lipopeptide or pharmaceutically acceptable salts thereof. The daptomycin or daptomycin-related lipopeptide may be monomeric or may be part of a lipopeptide micelle. A preferred dose is from about 1 to about 25 mg/kg of daptomycin or daptomycin-related lipopeptide or pharmaceutically acceptable salts thereof. A more preferred dose is from about 1 to 12 mg/kg daptomycin or a pharmaceutically acceptable salt thereof. These dosages for daptomycin may be used as a starting point by one of skill in the art to determine and optimize effective dosages of other linear and cyclic peptides produced by the modified NRPS complexes of the invention.

[0279] In one embodiment, the invention provides a method for treating an infection, especially those caused by gram-positive bacteria, in a subject with a therapeutically-effective amount of modified daptomycin or other antibacterial peptide or lipopeptide produced by a modified NRPS of the invention. The daptomycin or antibacterial peptide or lipopeptide may be monomeric or in a lipopeptide micelle. Exemplary procedures for delivering an antibacterial agent are described in U.S. Pat. No. 5,041,567, issued to Rogers and in PCT patent application number EP94/02552 (publication no. WO 95/05384), the entire contents of which documents are incorporated in their entirety herein by reference. As used herein the phrase “therapeutically-effective amount” means an amount of modified daptomycin or other antibacterial peptide or lipopeptide produced by a modified NRPS according to the present invention, that prevents the onset, alleviates the symptoms, or stops the progression of a bacterial infection. The term “treating” is defined as administering, to a subject, a therapeutically-effective amount of a compound of the invention, both to prevent the occurrence of an infection and to control or eliminate an infection. The term “subject”, as described herein, is defined as a mammal, a plant or a cell culture. In a preferred embodiment, a subject is a human or other animal patient in need of peptide or lipopeptide compound treatment.

[0280] The peptide or lipopeptide antibiotic compound can be administered as a single daily dose or in multiple doses per day. The treatment regime may require administration over extended periods of time, e.g., for several days or for from two to four weeks. The amount per administered dose or the total amount administered will depend on such factors as the nature and severity of the infection, the age and general health of the patient, the tolerance of the patient to the antibiotic and the microorganism or microorganisms involved in the infection. A method of administration is disclosed in U.S. Ser. No. 09/406,568, filed Sep. 24, 1999, herein incorporated by reference, which claims the benefit of U.S. Provisional Application Nos. 60/101,828, filed Sep. 25, 1998, and 60/125,750, filed Mar. 24, 1999.

[0281] The methods of the present invention comprise administering modified daptomycin or other peptide or lipopeptide antibiotics, or pharmaceutical compositions thereof to a patient in need thereof in an amount that is efficacious in reducing or eliminating the gram-positive bacterial infection. The antibiotic may be administered orally, parenterally, by inhalation, topically, rectally, nasally, buccally, vaginally, or by an implanted reservoir, external pump or catheter. The antibiotic may be prepared for opthalmic or aerosolized uses. Modified daptomycin, a peptide or lipopeptide antibiotic produced by a modified NRPS of the invention, or a pharmaceutical compositions thereof, also may be directly injected or administered into an abscess, ventricle or joint. Parenteral administration includes subcutaneous, intravenous, intramuscular, intra-articular, intra-synovial, cisternal, intrathecal, intrahepatic, intralesional and intracranial injection or infusion. In a preferred embodiment, daptomycin or another peptide or lipopeptide is administered intravenously, subcutaneously or orally.

[0282] The method of the instant invention may be used to treat a patient having a bacterial infection in which the infection is caused or exacerbated by any type of gram-positive bacteria. In a preferred embodiment, modified daptomycin, daptomycin-related lipopeptide, or another peptide or lipopeptide antibiotic produced by a modified NRPS of the invention, or pharmaceutical compositions thereof, are administered to a patient according to the methods of this invention. In another preferred embodiment, the bacterial infection may be caused or exacerbated by bacteria including, but not limited to, methicillin-susceptible and methicillin-resistant staphylococci (including Staphylococcus aureus, Staphylococcus epidermidis, Staphylococcus haemolyticus, Staphylococcus hominis, Staphylococcus saprophyticus, and coagulase-negative staphylococci), glycopeptide intermediary-susceptible Staphylococcus aureus (GISA), penicillin-susceptible and penicillin-resistant streptococci (including Streptococcus pneumoniae, Streptococcus pyogenes, Streptococcus agalactiae, Streptococcus avium, Streptococcus bovis, Streptococcus lactis, Streptococcus sangius and Streptococci Group C, Streptococci Group G and viridans streptococci), enterococci (including vancomycin-susceptible and vancomycin-resistant strains such as Enterococcus faecalis and Enterococcus faecium), Clostridium difficile, Clostridium clostridiiforme, Clostridium innocuum, Clostridium perfringens, Clostridium ramosum, Haemophilus influenzae, Listeria monocytogenes, Corynebacterium jeikeium, Bifidobacterium spp., Eubacterium aerofaciens, Eubacterium lentum, Lactobacillus acidophilus, Lactobacillus casei, Lactobacilllus plantarum, Lactococcus spp., Leuconostoc spp., Pediococcus, Peptostreptococcus anaerobius, Peptostreptococcus asaccarolyticus, Peptostreptococcus magnus, Peptostreptococcus micros, Peptostreptococcus prevotii, Peptostreptococcus productus, Propionibacterium acnes, and Actinomyces spp.

[0283] The antibacterial activity of daptomycin against classically “resistant” strains is comparable to that against classically “susceptible” strains in in vitro experiments. In addition, the minimum inhibitory concentration (MIC) value for daptomycin against susceptible strains is typically 4-fold lower than that of vancomycin. Thus, in a preferred embodiment, modified daptomycin, daptomycin-related lipopeptide antibiotic, a peptide or lipopeptide antibiotic produced by the modified NRPS of the invention, or pharmaceutical compositions thereof, are administered according to the methods of this invention to a patient who exhibits a bacterial infection that is resistant to other antibiotics, including vancomycin. In addition, unlike glycopeptide antibiotics, daptomycin exhibits rapid, concentration-dependent bactericidal activity against gram-positive organisms. Thus, in a preferred embodiment, daptomycin, a lipopeptide antibiotic, or pharmaceutical compositions thereof are administered according to the methods of this invention to a patient in need of rapidly acting antibiotic therapy.

[0284] The method of the instant invention may be used for a gram-positive bacterial infection of any organ or tissue in the body. These organs or tissue include, without limitation, skeletal muscle, skin, bloodstream, kidneys, heart, lung and bone. The method of the invention may be used to treat, without limitation, skin and soft tissue infections, bacteremia and urinary tract infections. The method of the invention may be used to treat community acquired respiratory infections, including, without limitation, otitis media, sinusitis, chronic bronchitis and pneumonia, including pneumonia caused by drug-resistant Streptoococcus pneumoniae or Haemophilus influenzae. The method of the invention also may be used to treat mixed infections that comprise different types of gram-positive bacteria, or which comprise both gram-positive and gram-negative bacteria, including aerobic, caprophilic or anaerobic bacteria. These types of infections include intra-abdominal infections and obstetrical/gynecological infections. The methods of the invention may be used in step-down therapy for hospital infections, including, without limitation, pneumonia, intra-abdominal sepsis, skin and soft tissue infections and bone and joint infections. The method of the invention also may be used to treat an infection including, without limitation, endocarditis, nephritis, septic arthritis and osteomyelitis. In a preferred embodiment, any of the above-described diseases may be treated using daptomycin, lipopeptide antibiotic, or pharmaceutical compositions thereof. Further, the diseases may be treated using daptomycin or lipopeptide antibiotic in either a monomeric or micellar form.

[0285] Modified daptomycin, daptomycin-related lipopeptide, or another peptide or lipopeptide produced by a modified NRPS according to the invention, may also be administered in the diet or feed of a patient or animal. If administered as part of a total dietary intake, the amount of modified daptomycin or other peptide or lipopeptide can be less than 1% by weight of the diet and preferably no more than 0.5% by weight. The diet for animals can be normal foodstuffs to which modified daptomycin or the other peptide or lipopeptide can be added or it can be added to a premix.

[0286] The method of the instant invention may also be practiced while concurrently administering one or more antifungal agents and/or one or more antibiotics other than modified daptomycin or other peptide or lipopeptide antibiotic. Co-administration of an antifungal agent and an antibiotic other than modified daptomycin or another peptide or lipopeptide antibiotic may be useful for mixed infections such as those caused by different types of gram-positive bacteria, those caused by both gram-positive and gram-negative bacteria, or those that caused by both bacteria and fungus. Furthermore, modified daptomycin or other peptide or lipopeptide antibiotic may improve the toxicity profile of one or more co-administered antibiotics. It has been shown that administration of daptomycin and an aminoglycoside may ameliorate renal toxicity caused by the aminoglycoside. In a preferred embodiment, an antibiotic and/or antifungal agent may be administered concurrently with modified daptomycin, other peptide or lipopeptide antibiotic, or in pharmaceutical compositions comprising modified daptomycin or another peptide or lipopeptide antibiotic.

[0287] Antibacterial agents and classes thereof that may be co-administered with modified daptomycin or other peptide or lipopeptide antibiotics include, without limitation, penicillins and related drugs, carbapenems, cephalosporins and related drugs, aminoglycosides, bacitracin, gramicidin, mupirocin, chloramphenicol, thiamphenicol, fusidate sodium, lincomycin, clindamycin, macrolides, novobiocin, polymyxins, rifamycins, spectinomycin, tetracyclines, vancomycin, teicoplanin, streptogramins, anti-folate agents including sulfonamides, trimethoprim and its combinations and pyrimethamine, synthetic antibacterials including nitrofurans, methenamine mandelate and methenamine hippurate, nitroimidazoles, quinolones, fluoroquinolones, isoniazid, ethambutol, pyrazinamide, para-aminosalicylic acid (PAS), cycloserine, capreomycin, ethionamide, prothionamide, thiacetazone, viomycin, eveminomycin, glycopeptide, glycylcylcline, ketolides, oxazolidinone; imipenen, amikacin, netilmicin, fosfomycin, gentamicin, ceftriaxone, Ziracin, LY 333328, CL 331002, HMR 3647, Linezolid, Synercid, Aztreonam, and Metronidazole, Epiroprim, OCA-983, GV-143253, Sanfetrinem sodium, CS-834, Biapenem, A-99058.1, A-165600, A-179796, KA 159, Dynemicin A, DX8739, DU 6681; Cefluprenam, ER 35786, Cefoselis, Sanfetrinem celexetil, HGP-31, Cefpirome, HMR-3647, RU-59863, Mersacidin, KP 736, Rifalazil; Kosan, AM 1732, MEN 10700, Lenapenem, BO 2502A, NE-1530, PR 39, K130, OPC 20000, OPC 2045, Veneprim, PD 138312, PD 140248, CP 111905, Sulopenem, ritipenam acoxyl, RO-65-5788, Cyclothialidine, Sch-40832, SEP-132613, micacocidin A, SB-275833, SR-15402, SUN A0026, TOC 39, carumonam, Cefozopran, Cefetamet pivoxil, and T 3811.

[0288] In a preferred embodiment, antibacterial agents that may be co-administered with modified daptomycin or peptide or lipopeptide antibiotic produced by a modified NRPS according to this invention include, without limitation, imipenen, amikacin, netilmicin, fosfomycin, gentamicin, ceftriaxone, teicoplanin, Ziracin, LY 333328, CL 331002, HMR 3647, Linezolid, Synercid, Aztreonam, and Metronidazole.

[0289] Antifungal agents that may be co-administered with modified daptomycin or other peptide or lipopeptide antibiotic include, without limitation, Caspofungen, Voriconazole, Sertaconazole, IB-367, FK-463, LY-303366, Sch-56592, Sitafloxacin, DB-289 polyenes, such as Amphotericin, Nystatin, Primaricin; azoles, such as Fluconazole, Itraconazole, and Ketoconazole; allylamines, such as Naftifine and Terbinafine; and anti-metabolites such as Flucytosine. Other antifungal agents include without limitation, those disclosed in Fostel et al., Drug Discovery Today 5:25-32 (2000), herein incorporated by reference. Fostel et al. disclose antifungal compounds including Corynecandin, Mer-WF3010, Fusacandins, Artrichitin/LL 15G256γ, Sordarins, Cispentacin, Azoxybacillin, Aureobasidin and Khafrefungin.

[0290] Modified daptomycin or other peptide or lipopeptide antibiotics, including daptomycin-related lipopeptides, may be administered according to this method until the bacterial infection is eradicated or reduced. In one embodiment, modified daptomycin, or other peptide or lipopeptide produced by a modified NRPS according to the invention, is administered for a period of time from 3 days to 6 months. In a preferred embodiment, modified daptomycin, or other peptide or lipopeptide, is administered for 7 to 56 days. In a more preferred embodiment, modified daptomycin, or other peptide or lipopeptide is administered for 7 to 28 days. In an even more preferred embodiment, modified daptomycin or other peptide or lipopeptide antibiotic is administered for 7 to 14 days. In another embodiment, the antibiotic is administered for 3 to 7 days. Modified daptomycin, or other peptide or lipopeptide produced by a modified NRPS according to the invention, according to the invention may be administered for a longer or shorter time period if it is so desired.

[0291] In order that this invention may be more fully understood, the following examples are set forth. These examples are for the purpose of illustration only and are not to be construed as limiting the scope of the invention in any way.

### EXAMPLE 1

### Initial Sequencing of the Streptomyces roseosporus Daptomycin Biosynthetic Gene Cluster

[0292] Streptomyces roseosporus strain A21978.6 (American Type Culture Collection Accession No. 31568) was used for the construction of a cosmid library. Genomic DNA was digested partially with Sau3A1 and alkaline phosphatase (Boehringer Mannheim Biochemicals). DNA of approximately 40 kb in length was isolated and ligated to BamHI-digested cosmid pKC1471 and packaged with a Gigapack packaging extract (Stratagene, Inc.) as described in Hosted and Baltz, J. Bacteriol., 179, pp. 180-186 (1997). Packaged DNA was introduced into E. coli XL1-Blue-MFR (Stratagene, Inc.) and individual clones containing cosmid DNA were stored as an ordered array in a 96-well dot blot apparatus. Twelve cultures from a row of microtiter wells were pooled, and screened by hybridization to a 2.1-kB SphI fragment of DNA from plasmid pRHB153 and to a 5.2-kB DraI-KpnI fragment from pRHB157, both containing NRPS sequences cloned from S. roseosporus (see McHenney et al., supra). Individual cosmids from the hybridizing pools were identified by hybridization to the same probes.

[0293] Cosmid and plasmid DNA was hydrodynamically sheared and then separated by electrophoresis on a standard 1% agarose gel. The separated DNA fragments 2500-3000 bp in length were excised from the gel and purified by the GeneClean™ procedure (BIO 101, Inc.). The ends of the gel-purified DNA fragments were then filled in or made blunt using T4 DNA polymerase. The DNA fragments were ligated to unique BstXI-linker adapters (5′-GTCTTCACCACGGGG-3′-SEQ ID NO: 13, and 5′GTGGTGAAGAC-3′-SEQ ID NO: 14, in 100-1000 fold molar excess). These linkers are complementary to the BstXI-cut pGTC vector (Genome Therapeutics Corp., Waltham, Mass.), while the overhang is not self-complementary. Therefore, the linkers will not concatemerize, nor will the open vector self-ligate easily. The linker-adapted inserts were separated from the unincorporated linkers by electrophoresis on a 1% agarose gel and purified using GeneClean™. The purified linker-adapted inserts were ligated to BstXI-cut pGTC vector to construct “shotgun” subclone libraries.

[0294] The pGTC library was then transformed into DH5α competent cells (Gibco/BRL, DH5α transformation protocol). Transformation was assessed by plating onto antibiotic plates containing ampicillin and IPTG/Xgal (IPTG=isopropyl-b-D-thiogalactopyranoside; Xgal=5-bromo-4-chloro-3-indoyl-b-D-thiogalactopyranoside.) The plates were incubated overnight at 37° C. Transformants were plate purified and the purified clones containing the following plasmids were picked for further analysis.

[0295] Plasmids pRHB160, containing an insert of approximately 50 kb of S. roseosporus DNA, pRHB613, containing an insert of approximately 15 kb, pRHB614, containing an insert of approximately 13 kb, and pRHB159, containing an insert of approximately 51 kb, were chosen for DNA sequencing. (See McHenney et al., supra).

[0296] Individual cultures of strains transformed with the above plasmids were grown overnight at 37° C. DNA was purified using a silica bead DNA preparation method (Engelstein et al., Microb. Comp. Genomics 3(4):237-241, 1998). In this manner, 25 mg of DNA were obtained per clone. These purified DNA samples were then sequenced using primarily ABI dye-terminator chemistry. All subsequent steps were based on sequencing by ABI377 or Amersham automated DNA sequencing methods according to the manufacturer's instructions. The ABI dye terminator sequence reads were run on either ABI377 or Amersham MegaBace™ capillary machines. The data were transferred to UNIX machines following lane tracking of the gels. Base calls and quality scores were determined using the program PHRED (Ewing et al., Genome Res. 8:175-185, 1998). Reads were assembled using PHRAP (P. Green, Abstracts of DOE Human Genome Program Contractor-Grantee Workshop V, January 1996, p. 157) with default program parameters and quality scores. The initial assembly was done at 6× coverage.

### EXAMPLE 2

### Isolation and Analysis of Additional DNA Molecules of the Streptomyces roseosporus Biosynthetic Gene Cluster

[0297] Mycelium for preparation of megabase DNA was obtained from overnight cultures of Streptomyces roseosporus (NRRL11379) (ATCC No. 31568) shaken in F10A broth (2% agar, 25% soluble starch, 0.2% dextrose, 0.5% yeast extract, 0.5% peptone and 0.3% calcium carbonate) at 30° C. Washed cells were embedded in Seakem™ GTG agarose (FMC Bioproducts, 1% final concentration), incubated in lysozyme (2 mg/mL TE) at 37° C. for 3 h, then lysed in 0.1×NLS+0.2 mg/mL proteinase K at 50° C. overnight to release DNA into the gel matrix. Agarose containing DNA was washed with 1 mM EDTA (pH 8) before treatment with BamHI at 37° C. Partially digested DNA was then subjected to a two-step size selection process in 0.6% agarose gels (in 0.5×TBE) by pulsed-field electrophoresis using a CHEF Mapper DRIII (Biorad) set at 6V/cm, 120° angle, 12° C. The first selection consisted of a 14 h run with a 22-44 sec linearly ramped switch time. Gel containing DNA co-migrating with 100-200 kb lambda concatamer size markers was excised and cast in a second gel for an 18 h run with a 3-5 sec linear ramp. DNA estimated at 75-145 kb relative to size markers was electroeluted (MiniProtean II Cell model, Biorad) in TAE.

[0298] The single-copy BAC library cloning vector pStreptoBAC V is derived from pBACe3.6 (Frengen et al., A modular, positive selection bacterial artificial chromosome vector with multiple cloning sites, Genomics, 58: 250-253 (1999)). The pBACe3.6 was modified to contain two markers, Amp^{R} for selection in E. coli and Apra^{R} for selection in Streptomyces, as well as oriT and attP sequences from the phage jC31 for conjugation and site specific integration in Streptomyces. See FIG. 6. To prepare the pStreptoBAC V vector for ligation with the S. roseosporus DNA, the vector was first digested with BamHI and the reaction was inactivated by heat (65° C. for 1 h). DNA was then dephosporylated with Shrimp Alkaline Phosphatase for 30 min. The two bands (13 kb and 3 kb corresponding to the pUC fragment) were separated on 0.6% agarose gel and the 13 kb band was purified using Geneclean spin columns.

[0299] 200 ng of the S. roseosporus DNA was ligated to 75 ng of BamHI cut and phosphatased pStreptoBAC V vector DNA using 9 U of T4 DNA ligase (Promega) in a 150 μl reaction. After 16 h at 16° C., the ligations were heated at 65° C. for 30 min, dialyzed against 10% polyethylene glycol 8000, and transformed into 10 μl of DH10B electrocompetent cells (Gibco/BRL) using a cell porator with voltage booster (Gibco/BRL) at 300 V and 4 kΩ. Cells were plated on media (LB agar) containing 100 mg/mL apramycin and 5% sucrose. Analysis of sample clones showed a range of inserts from 39 kb to 105 kb. The mean insert size was 71.4 kb, with a standard deviation of 14.7 kb. Approximately 2,000 clones were archived at −80° C. in 96-well microtiter plates.

[0300] This BAC library was screened using the polymerase chain reaction (PCR) using primer pairs P61/P62, P72/P73 and P74/P75, shown below. Nucleotide positions refer to the numbering of SEQ ID NO: 1, and “C” indicates that the primer sequence corresponds to the complementary strand of SEQ ID NO: 1:

| | | SEQ | Nucleotide |
|---|---|---|---|
| Primer | Sequence | ID NO: | Position |
| P61 | GCTCGTCCCCCTCCCCGCACT | 137 | 41305-41325 |
| P62 | CGAACAGGTGGGCTTTGAG | 138 | 41993-42014 (C) |
| | TGG | | |
| P72 | CTTCGTGAACACCCTCGTCC | 139 | 82103-82122 |
| P73 | GTTCGTCGAGGTCCAGTACG | 140 | 83009-83028 (C) |
| P74 | GCACCAGCGTGTGCGGATCG | 141 | 92-111 |
| P75 | CACGTACGTGACGATCCTCG | 142 | 800-819 (C) |

[0301] PCR was performed under the following conditions: 94° C., 45 sec., 54° C., 30 sec., 72° C., 1 min. for 32 cycles. Taq polymerase, as well as the accessory reagents, were supplied by Gibco BRL (Bethesda); all reactions included 5% DMSO.

[0302] Clone B12:03A05 was initially detected with primer pair P61/P62 (see above), and subsequently confirmed as a positive hit with the other two primer pairs. DNA of clone B12:03A05 was obtained by standard alkaline lysis procedures and used for DNA sequencing (see below).

[0303] A number of other clones that encompass parts of the daptomycin gene cluster (dpt-related clones) were isolated from the BAC library. These clones include B12:01G05 (insert size 82 kb), B12:06A12 (insert size 85 kb), B12:12F06 (insert size 65 kb), B12:18H04 (insert size 46 kb) and B12:20C09 (insert size 65 kb). See FIG. 7, which shows a HinDIII digest of these BAC clones. Other BACs that were isolated in the daptomycin gene cluster region include B12:09D02, B12:17F08, B12:05D08, B12:15H07, B12:21F10 and B12:16D12. These BACS cover 180 to 200 kb. FIG. 8 shows the approximate location of the BAC clones relative to the daptomycin gene cluster.

[0304] Extension of the daptomycin biosynthetic gene cluster sequence determined in Example 2 was accomplished by sequencing 1 μg aliquots of BAC DNA from clone B12:03A05 using the ABI Prism Dye Terminator Cycle Sequencing Ready Reaction kit (Perkin Elmer), the manufacturer's recommended reaction mix and conditions, and the following primers (C indicates that the primer sequence corresponds to the complementary strand of SEQ ID NO: 1):

| | | SEQ | Nucleotide |
|---|---|---|---|
| Primer | Sequence | ID NO: | Position |
| P76 | CGTACTGGACCTCGACGACC | 143 | 83009-83028 |
| P78 | CGACCAGCGTGTGTACGTCC | 144 | 83609-83628 |
| P92 | AGTCCTCAGCCATCTCCTCG | 145 | 84584-84603 (C) |
| P84 | GAGACCGTCGGCGTGGACG | 146 | 84222-84240 |
| P95 | AGGGCCACACCGTCGAACTCC | 147 | 84709-84729 |
| P86 | ATCGTCGCCGACTACCTCGC | 148 | 84795-84814 |
| P96 | GGCAGCTACCTCGTACTGG | 149 | 85297-85315 |
| P97 | TGTACGACAGCGGCGTCGAAC | 150 | 85959-85979 |
| P101 | CGATTCTCGGCATGTTCGCC | 151 | 86636-86655 |
| P105 | TCGTCTCCTACATGACCTCG | 152 | 87194-87213 |
| P107 | TTCACGGAAACCGAACGTCG | 153 | 87864-87883 |
| P111 | GGTTCAGGCCGCAGCCAACG | 154 | 88468-88487 |
| P117 | CGCTGACCTTGGTCAGAAGCC | 155 | 89176-89196 |

[0305] Electrophanerograms were inspected and corrected as appropriate, and the sequences were aligned using the AssemblyLign Module of MacVector™. The aligned sequence (contig) was saved as a MacVector™ file for analysis and annotation. Identification of potential ORFs and potential stops/starts was performed using the open reading frames option in MacVector™.

[0306] Analysis of the 90 kb sequence showed a total of 38 open reading frames in the daptomycin biosynthetic gene cluster region. See FIG. 2. The ORFs range in size from 228 basepairs (bp) to 22 kb. The three largest ORFs are NRPS genes, as discussed below. One of the NRPS genes were predicted to have thioesterase activity based on the presence of conserved motifs, GXSXG (see Example 3). Another predicted open reading frames also encodes a protein with thioesterase activity (see Example 3). A number of potential ABC transporters were also identified.

[0307] The sequence of the daptomycin biosynthetic gene cluster is shown in SEQ ID NO: 1. See also FIG. 2. The genes encoding the daptomycin non-ribosomal peptide synthetase (NRPS) are designated dptA, dptBC and dptD. We designate as a promoter region all sequences upstream from the start of an ORF of interest that are not part of an upstream ORF. Because dptA, dptBC and dptD have overlapping start and stop codons and apparently are translationally coupled (e.g., the TGA stop codon of dptBC overlaps with the ATG start codon of dptD, which is presumably associated with its own ribosome binding site), we thus indicate the promoter of the whole cluster (comprising dptE, dptF, dptA, dptBC and dptD) as the daptomycin NPRS promoter.

[0308] The DNA sequence of the ORF of the daptomycin NRPS dptA gene (nucleotides 38555-56047 of SEQ ID NO: 1) is shown in SEQ ID NO: 10. The ORF is 17493 nucleotides in length. The amino acid sequence of the encoded DptA protein is shown in SEQ ID NO: 9. The protein is 5830 amino acid residues in length.

[0309] The DNA sequence of the ORF of the daptomycin NRPS dptBC gene (nucleotides 56044-78060 of SEQ ID NO: 1) is shown in SEQ ID NO: 12. The ORF is 22017 nucleotides in length. The amino acid sequence of the encoded DptBC protein is shown in SEQ ID NO: 11. The protein is 7338 amino acid residues in length.

[0310] The DNA sequence of the ORF of the daptomycin NRPS dptD gene (nucleotides 78057-85196 of SEQ ID NO: 1) is shown in SEQ ID NO: 3. The ORF is 7140 nucleotides. The dptD gene ORF encodes a type I thioesterase (TEI) domain at the C-terminus. The amino acid sequence of the predicted DptD protein is shown in SEQ ID NO: 7 (see FIG. 3). The protein is 2379 amino acids in length

[0311] The dptE and dptF genes are located between dptA and the daptomycin NPRS promoter.

[0312] The DNA sequence of the dptH thioesterase-encoding gene is shown in SEQ ID NO: 4 (nucleotides 85498-86350 of SEQ ID NO: 1); the promoter region of dptH is shown in SEQ ID NO: 5 (nucleotides 85498-85534 of SEQ ID NO: 1); and the open reading frame of dptH is shown in SEQ ID NO: 6 (nucleotides 85535-86350 of SEQ ID NO: 1). The amino acid sequence of the predicted DptH protein is shown in SEQ ID NO: 8 (see FIG. 4).

[0313] The promoter region of the daptomycin NRPS (nucleotides 36018-36407 of SEQ ID NO: 1) is shown in SEQ ID NO: 2.

[0314] The sequence for the DNA downstream of the 90 kb contig was generated by Genome Therapeutics Corps. from plasmid pV107 by transposon primed sequencing using a system such as GPS-1 Genome priming system (New England Biolabs). Plasmid pV107 comprises an approximately 28 kb EcoRI fragment subcloned using standard techniques from B12:03A05 genome into the vector pNEB193, cut with EcoRI (New England Biolabs). The fragment is called the GTC2 fragment. An adequate number of transposon tagged library clones were sequenced to generate a 6-fold redundant contig, and additional local sequencing off PCR products was used to polish the sequence where needed. The overlap between the 5′ end of the contig and the existing 90 kb was removed from the contig, so that the beginning of the pV107 derived sequences (referred to as GTC2) starts with 1. The sequence of the GTC2 fragment is provided in SEQ ID NO: 106.

### EXAMPLE 3

### Identification of the dptD and dptH Genes as Thioesterases

[0315] Amino acid motifs typical of non-ribosomal peptide synthetases and thioesterases were identified by inspection of the dptD and dptH genes and predicted translation products thereof. The amino acid sequence motif GXSXG, wherein X is any one of the twenty L-amino acids that are inserted translationally into ribosomally produced proteins, is indicative of thioesterases (See Mootz et al., J. Bacteriol. 179:6843-6850, 1997, incorporated herein by reference in its entirety). SEQ ID NOs 7-8 were inspected for the GXSXG thioesterase motif. In SEQ ID NO:7, the amino acid sequence match to the thioesterase motif GWSFG was found at coordinates 2200-2204, encoded by nucleotides 84654-84668 of SEQ ID NO:1. In SEQ ID NO:8, the amino acid sequence match to the thioesterase motif GTSLG was found at coordinates 97-101, encoded by nucleotides 85823-85838 of SEQ ID NO:1.

[0316] The DptD protein of SEQ ID NO:7 was aligned to the CDA III protein of Streptomyces coelicolor. The alignment was performed using the Clustal W (v1.4) program in slow pairwise alignment mode. An open gap penalty of 10.0, an extend gap penalty of 0.1, and a blosum similarity matrix to the CDA III protein was used. The CDA III protein is a non-ribosomal peptide synthetase with a carboxy-terminal thioesterase domain (see GENBANK accession number AL035707, version AL035707.1 GI:4490978, hereby incorporated by reference in its entirety). The CDA III amino acid sequence used for the alignment was generated using the MacVector program by creating a contig from two GENBANK cosmid sequences, AL035707 and AL035640, and then translating the open reading frame in the contig annotated in GENBANK. The sequence comparison (FIG. 3) revealed an alignment score of 7705 and 1223 conserved identities, indicating significant similarity between the two compared sequences. The GXSXG thioesterase motifs of the DptD protein and the CDA III protein were aligned in this analysis.

[0317] The GXSXG thioesterase motif of the DptH protein of SEQ ID NO: 8 was aligned to the GXSXG thioesterase motif of the CDA III protein of Streptomyces coelicolor (CAA71338 protein, see above). The alignment was performed the Clustal W (v1.4) program in slow pairwise alignment mode. An open gap penalty of 10.0, an extend gap penalty of 0.1, and a blosum similarity matrix to the Streptomyces thioesterase protein of GENPEPT record CAA71338 (version CAA71338.1 GI:2647975, hereby incorporated by reference in its entirety) was used. The alignment (FIG. 4) revealed an alignment score of 955 and 145 conserved identities indicating significant similarity between the two compared sequences.

[0318] These analyses show that dptD and dptH encode thioesterase proteins, specifically, the proteins of SEQ ID NOS: 7-8.

### EXAMPLE 4

### Identification of a Daptomycin NRPS

[0319] Identification of dptD as a Daptomycin NRPS Subunit

[0320] The predicted translation products of the dptD DNA sequences described above (Examples 2 and 3) were inspected visually for the occurrence of various protein motifs described in the NRPS literature. A dptD condensation (“M”) motif, indicative of a condensation domain, was identified at nucleotides 78486-78509 of SEQ ID NO: 1 (all of the nucleotide positions discussed in Examples 4-6 refer to SEQ ID NO: 1). See, e.g., Kleinkauf et al., Eur. J. Biochem., 236, pp. 335-351 (1996) for the various motifs in the NRPS; and Pospiech et al., Microbiology, 142, pp. 741-746 (1996). An ATP-binding (“C”) motif was identified at nucleotides 79896-79928, an ATP-binding (“E”) motif was identified at nucleotides 80451-80486, an ATPase (“F”) motif was identified at nucleotides 80556-80579, and an ATP-binding (“G”) motif was identified at nucleotides 80652-80675. These motifs collectively are indicative of an adenylation domain. A thiolation (“J”) motif, indicative of a thiolation (PCP) domain, was identified at nucleotides 81048-81062. The above motifs, and the domains that they signify, belong to module 1 of dptD; in terms of daptomycin synthetase, this is module 12.

[0321] Another dptD condensation (“M”) motif, indicative of a condensation domain, was identified at nucleotides 81621-81644. Another ATP-binding (“C”) motif was identified at nucleotides 83114-83147, an ATP-binding (“E”) motif was identified at nucleotides 83667-83702, an ATPase (“F”) motif was identified at nucleotides 83772-83795, and an ATP-binding (“G”) motif was identified at nucleotides 83868-83891. The above motifs collectively are indicative of another adenylation domain. Also a thiolation (“J”) motif, an indicator of a thiolation (PCP) domain, was identified at nucleotides 84255-84269. The above motifs, and the domains that they signify, belong to module 2 of dptD; in terms of daptomycin synthetase, this is module 13.

[0322] The DptD amino acid sequences corresponding to the above-described predicted motifs and domains were identified (all of the amino acid positions for DptD refer to the amino acid positions in SEQ ID NO: 7). The motifs, and the domains that they signify, belonging to module 1 of DptD (corresponding to module 12 of daptomycin synthetase) are as follows: A DptD condensation (“M”) motif was identified at coordinates 144-151; an ATP-binding (“C”) motif was identified at coordinates 614-624; an ATP-binding (“E”) motif was identified at coordinates 799-810; an ATPase (“F”) motif was identified at coordinates 834-841; an ATP-binding (“G”) motif was identified at coordinates 866-873; and a thiolation (“J”) motif was identified at coordinates 998-1002.

[0323] The DptD motifs, and the domains that they signify, belonging to module 2 of DptD (corresponding to module 13 of daptomycin synthetase) are as follows: A DptD condensation (“M”) motif was identified at coordinates 1189-1196; an ATP-binding (“C”) motif was identified at coordinates 1687-1697; an ATP-binding (“E”) motif was identified at coordinates 1871-1882; an ATPase (“F”) motif was identified at coordinates 1906-1913; an ATP-binding (“G”) motif was identified at coordinates 1938-1945; and a thiolation (“J”) motif was identified at coordinates 2067-2071. The ATP-binding motifs are representative of adenylation domains.

[0324] Identification of dptA and dptBC as Daptomycin NRPS Subunits

[0325] Certain M, C, E, F, G and J motifs were identified in a similar fashion in dptA and dptBC. The sequence and type of each motif, the genes and modules in which each motif is found, as well as the amino acid and nucleotide coordinates of each motif, are shown below in Table 1:

TABLE 1

| Gene | Module | Motif Type | Sequence | Amino Acid Coordinates | Nucleotide Coordinates |
|---|---|---|---|---|---|
| dptA | 1 | M | HHIALDGY | 138-145 | 38966-38989 |
| dptA | 1 | C | QTSGSTGRPKG | 603-613 | 40361-40393 |
| dptA | 1 | E | GELYLAGEGLAR | 784-795 | 40904-40939 |
| dptA | 1 | F | RMYRTGDL | 819-826 | 41009-41032 |
| dptA | 1 | G | RIELGEVQ | 851-858 | 41105-41128 |
| dptA | 1 | J | LGGHS | 981-985 | 41495-41509 |
| dptA | 2 | M | HHTAGDGA | 1167-1174 | 42053-42076 |
| dptA | 2 | C | YTSGSTGRPKG | 1657-1667 | 43523-43555 |
| dptA | 2 | E | GELHVAGEGLAR | 1843-1854 | 44081-44116 |
| dptA | 2 | F | RMYRTGDL | 1878-1885 | 44186-44209 |
| dptA | 2 | G | RIELGEVE | 1910-1917 | 44282-44305 |
| dptA | 2 | J | LGGDS | 2041-2045 | 44675-44689 |
| dptA | 3 | M | HHVILDGW | 2751-2758 | 46805-46828 |
| dptA | 3 | C | YTSGSTGLPKG | 3238-3248 | 48266-48298 |
| dptA | 3 | E | GELYVAGDGLAR | 3420-3431 | 48812-48847 |
| dptA | 3 | F | RMYRTGDL | 3455-3462 | 48917-48940 |
| dptA | 3 | G | RIELGEVE | 3487-3494 | 49013-49036 |
| dptA | 3 | J | LGGHS | 3616-3620 | 49400-49414 |
| dptA | 4 | M | HHIAGDGW | 3806-3813 | 49970-49993 |
| dptA | 4 | C | YTSGSTGRPKG | 4292-4302 | 51428-51460 |
| dptA | 4 | E | GEMYVAGAGLAR | 4490-4501 | 52022-52057 |
| dptA | 4 | F | RLYRTGDL | 4525-4532 | 52127-52150 |
| dptA | 4 | G | RIELGEIE | 4557-4564 | 52223-52246 |
| dptA | 4 | J | LGGHS | 4688-4692 | 52616-52630 |
| dptA | 5 | M | HHIAGDGW | 4873-4880 | 53171-53194 |
| dptA | 5 | C | HTSGSTGRPKG | 5363-5373 | 54641-54673 |
| dptA | 5 | E | GEIHIAGSGLAR | 5553-5564 | 55211-55246 |
| dptA | 5 | F | RMYRTGDL | 5587-5594 | 55313-55336 |
| dptA | 5 | G | RIELGDVE | 5619-5626 | 55409-55432 |
| dptA | 5 | J | LGGDS | 5749-5753 | 55799-55813 |
| dptBC | 1 | M | HHVILDGW | 142-149 | 56467-56490 |
| dptBC | 1 | C | HTSGSTGRPKG | 611-621 | 57874-57906 |
| dptBC | 1 | E | GELYLAGTQLAR | 803-814 | 58450-58485 |
| dptBC | 1 | F | RMYRTGDL | 838-845 | 58555-58578 |
| dptBC | 1 | G | RIEPAEIE | 870-877 | 58651-58674 |
| dptBC | 1 | J | AGGHS | 998-1002 | 59035-59049 |
| dptBC | 2 | M | HHIAGDGW | 1184-1191 | 59593-59616 |
| dptBC | 2 | C | YTSGSTGRPKG | 1691-1701 | 61114-61146 |
| dptBC | 2 | E | GELYVAGVGLAR | 1873-1884 | 61660-61695 |
| dptBC | 2 | F | RMYRTGDL | 1908-1915 | 61765-61788 |
| dptBC | 2 | G | RVELGEVE | 1940-1947 | 61861-61884 |
| dptBC | 2 | J | LGGHS | 2069-2073 | 62248-62262 |
| dptBC | 3 | M | HHVAFDAM | 2259-2266 | 62818-62841 |
| dptBC | 3 | C | YTSGSTGRPKG | 2740-2750 | 64261-64293 |
| dptBC | 3 | E | GELYVAGVGLAR | 2923-2934 | 64810-64845 |
| dptBC | 3 | F | RMYRTGDL | 2958-2965 | 64915-64938 |
| dptBC | 3 | G | RVELGEVE | 2990-2997 | 65011-65034 |
| dptBC | 3 | J | LGGDS | 3118-3122 | 65395-65409 |
| dptBC | 4 | M | HHVVLDGW | 3805-3812 | 67456-67479 |
| dptBC | 4 | C | YTSGSTGRPKG | 4282-4292 | 68887-68919 |
| dptBC | 4 | E | GELYVAGVGLAR | 4464-4475 | 69433-69468 |
| dptBC | 4 | F | RMYRTGDL | 4499-4506 | 69538-69561 |
| dptBC | 4 | G | RVELGEVE | 4531-4538 | 69634-69657 |
| dptBC | 4 | J | LGGHS | 4662-4666 | 70027-70041 |
| dptBC | 5 | M | HHIAGDGW | 4852-4859 | 70597-70620 |
| dptBC | 5 | C | YTSGSTGQPKG | 5340-5350 | 72061-72093 |
| dptBC | 5 | E | GELYIAGDGLAR | 5526-5537 | 72619-72654 |
| dptBC | 5 | F | RMYRTGDL | 5561-5568 | 72724-72747 |
| dptBC | 5 | G | RVELGEVE | 5593-5600 | 72820-72843 |
| dptBC | 5 | J | LGGHS | 5722-5726 | 73206-73221 |
| dptBC | 6 | M | HHIAGDGW | 5913-5920 | 73780-73803 |
| dptBC | 6 | C | YTSGSTGRPKG | 6394-6404 | 75223-75255 |
| dptBC | 6 | E | GELYLAGAGLAR | 6584-6595 | 75793-75828 |
| dptBC | 6 | F | RMYRTGDL | 6619-6626 | 75898-75921 |
| dptBC | 6 | G | RVELGEVE | 6651-6658 | 75994-76017 |
| dptBC | 6 | J | LGGDS | 6781-6785 | 76384-76398 |

[0326] The amino acid coordinates in Table 1 refer to the amino acid sequence of each protein (DptA: SEQ ID NO: 9; DptBC: SEQ ID NO: 11). The nucleotide position refers to the nucleotide position in SEQ ID NO: 1.

### EXAMPLE 5

### Amino Acid Pocket Code Annotation

[0327] The amino acid pocket code refers to a set of amino acid residues in the adenylation (A) domain that are believed to be involved in recognition and or binding of the cognate amino acid. The amino acid pocket code for the thirteen daptomycin synthetase modules are shown below (Table 2).

[0328] The amino acid pocket code for the daptomycin synthetase modules was identified by Blast analysis or visual inspection of alignments created using MacVector 7.0 of the putative Dpt translation product aligned with NRPS A domains (amino acid binding pockets) as described in Stachelhaus et al. (1999), The specificity-conferring code of adenylation domains in nonribosomal peptide synthetases, Chem. Biol., 6:493-505. See also Challis et al., (2000), Predictive, structure-based model of amino acid recognition by nonribosomal peptide synthetase adenylation domains, Chem. Biol. 7:211-224.

TABLE 2

| | Module | | | |
|---|---|---|---|---|
| | (Amino | Pocket | Amino Acid | Nucleotide |
| Protein | acid) | Code | Coordinates | Position |
| DptA | 1 (Trp) | DVSSIGAV | 649, 650, 653, | 40499-40780 |
| | | | 690, 711, 713, | |
| | | | 734, 742 | |
| DptA | 2 (Asn) | DLTKLGDV | 1702, 1703, 1706, | 43658-43949 |
| | | | 1741, 1764, 1766, | |
| | | | 1790, 1798 | |
| DptA | 3 (Asp) | DLTKLGAV | 3284, 3285, 3288, | 48404-48679 |
| | | | 3318, 3341, 3343, | |
| | | | 3367, 3375 | |
| DptA | 4 (Thr) | DFWSVGMV | 4338, 4339, 4342, | 51566-51892 |
| | | | 4381, 4410, 4412, | |
| | | | 4438, 4446 | |
| DptA | 5 (Gly) | DILQLGVI | 5409, 5410, 5413, | 54779-55087 |
| | | | 5452, 5479, 5481, | |
| | | | 5503, 5511 | |
| DptBC | 1 (Orn) | DTWDMGYV | 662, 663, 665, | 58027-58332 |
| | | | 704, 730, 732, | |
| | | | 755, 763 | |
| DptBC | 2 (Asp) | DLTKLGAV | 1737, 1738, 1741, | 61252-61527 |
| | | | 1771, 1794, 1796, | |
| | | | 1820, 1828 | |
| DptBC | 3 (Ala) | DVVSAAFV | 2786, 2787, 2790, | 64399-64686 |
| | | | 2824, 2847, 2849, | |
| | | | 2873, 2881 | |
| DptBC | 4 (Asp) | DLTKLGAV | 4328, 4329, 4332, | 69025-69300 |
| | | | 4362, 4385, 4387, | |
| | | | 4411, 4419 | |
| DptBC | 5 (Gly) | DILQVGMI | 5386, 5387, 5390, | 72200-72495 |
| | | | 5429, 5452, 5454, | |
| | | | 5476, 5484 | |
| DptBC | 6 (Ser) | DVWHISLV | 6440, 6441, 6444, | 75361-75666 |
| | | | 6483, 6508, 6510, | |
| | | | 6533, 6541 | |
| DptD | 1 (3- | DLGKTGVI | 659, 660, 663, | 80031-80318 |
| | MG) | | 697, 720, 722, | |
| | | | 746, 754 | |
| DptD | 2 (Kyn) | DAWTTTGV | 1733, 1734, 1737, | 83253-83540 |
| | | | 1775, 1796, 1798, | |
| | | | 1820, 1828 | |

[0329] The amino acid coordinates in Table 2 refer to the amino acid sequence of each protein (DptA: SEQ ID NO: 9; DptBC: SEQ ID NO: 11; DptD: SEQ ID NO: 7). The nucleotide position refers to the nucleotide position in SEQ ID NO: 1.

[0330] Similarities between essentially the entire adenylation domains for aspartate and asparagine in the daptomycin gene cluster and for the adenylation domains for aspartate, asparagine and threonine in the CDA III NRPS of Streptomyces coelicolor are shown in FIG. 10. Amino acids were aligned and the dendrogram was constructed using the MacVector. The nomenclature is as follows: the name of the gene—the module number in the gene—the amino acid activated (one letter code). The alignment shows that the adenylation domains for aspartate and asparagine in the daptomycin gene cluster are more similar to each other than they are to a domain from an unrelated amino acid such as threonine. Further, the alignment shows that the adenylation domains for aspartate and asparagine in the daptomycin gene cluster are more similar to each other than they are similar to the modules for aspartate and asparagine in CDA.

### EXAMPLE 6

### Identification of Epimerase Domains in Daptomycin NRPS

[0331] The amino acid sequences of DptA, DptBC and DptD were inspected for sequences that are characteristic of epimerase domains. Epimerase domains are responsible for converting an L-amino acid to a D-amino acid and are typically encoded by approximately 1.4-1.6 kb of DNA.

[0332] It was expected that there would be a total of two epimerase domains in the daptomycin gene cluster, because it was known that daptomycin contained two D-amino acids, D-Ala and D-Ser. One epimerase domain was identified in each of module 8 (D-Ala) and module 11 (D-Ser). Module 8 and 11 are approximately 1.4 kb larger than modules that did not contain an epimerase domain (approximately 4.6 kb each for modules 8 and 11 compared to 3.2 kb each for modules not containing an epimerase domain). Further, modules 8 and 11 contain motifs that are indicative of an epimerase domain, including the motifs K, L, M, N, O, P and Q (see Kleinkauf and Von Dohren, 236:355-351 (1996)). See Table 3.

[0333] Surprisingly, an epimerase domain was also identified in module 2. Module 2 is 1.6 kb larger than expected. Further, module 2 contains a number of motifs that are characteristic of an epimerase domain, including motifs K, L, M, N, O, P and Q. See Table 3. This unexpected finding suggests that the asparagine in daptomycin is in the D configuration.

TABLE 3

| Gene | Module | Motif Type | Sequence | Amino Acid Coordinates | Nucleotide Coordinates |
|---|---|---|---|---|---|
| dptA | 2 | K | RWPVVEWL | 2100-2107 | 44852-44875 |
| dptA | 2 | L | VRERHDAW | 2146-2153 | 44990-45013 |
| dptA | 2 | M | HHLVVDGVSWRIVLG | 2237-2251 | 45263-45307 |
| dptA | 2 | N | VVDVEGHGRN | 2374-2383 | 45674-45703 |
| dptA | 2 | O | TVGWFTSIYPVRL | 2395-2407 | 45737-45775 |
| dptA | 2 | P | PDQGLGY | 2439-2445 | 45869-45689 |
| dptA | 2 | Q | FGFNYLG | 2467-2473 | 45953-45973 |
| dptBC | 3 | K | RWPVVEWL | 3183-3190 | 65590-65613 |
| dptSC | 3 | L | VRDRHEAW | 3229-3236 | 65728-65751 |
| dptBC | 3 | M | HHLVVDGVSWRVVLG | 33315-3329 | 65986-66030 |
| dptBC | 3 | N | VVDVEGHGRN | 3452-3461 | 66397-66426 |
| dptBC | 3 | O | TVGWFTSVYPVRV | 3473-3485 | 66460-66498 |
| dptBC | 3 | P | PDQGLGY | 3517-3523 | 66592-66612 |
| dptBC | 3 | Q | FGFNYLG | 3545-3551 | 66676-66696 |
| dptBC | 6 | K | RWPVVEWL | 6846-6853 | 76579-76602 |
| dptBC | 6 | L | VRDRHEAW | 6892-6899 | 76717-76740 |
| dptBC | 6 | M | HHLVVDGVSWRVVLG | 6978-6992 | 76975-77019 |
| dptBC | 6 | N | VVDVEGHGRN | 7115-7124 | 77383-77415 |
| dptBC | 6 | O | TVGWFTSVYPVRV | 7136-7148 | 77449-77487 |
| dptBC | 6 | P | PDQGLGY | 7180-7186 | 77581-77601 |
| dptBC | 6 | Q | FGFNYLG | 7208-7214 | 77665-77685 |

[0334] The amino acid coordinates in Table 3 refer to the amino acid sequence of each protein (DptA: SEQ ID NO: 9; DptBC: SEQ ID NO: 11; DptD: SEQ ID NO: 7). The nucleotide position refers to the nucleotide position in SEQ ID NO: 1.

[0335] To confirm that the asparagine in daptomycin was in the D configuration, high pressure liquid chromatography (HPLC) was performed. A hexa-peptide containing the amino acids ornithine, glycine, threonine, aspartic acid, asparagine, and deacylated tryptophan (Trp-Asn-Asp-Orn-Gly-Thr) was isolated from daptomycin by degradation. The peptide above was analyzed by HPLC under conditions that would separate the peptide containing either the D-Asn or L-Asn. The HPLC showed only a single large peak for the isolated peptide above. See FIG. 11, left panel. The peptide isolated from daptomycin was mixed with a peptide of the same sequence that had been synthesized in the laboratory and which contained D-Asn. The peptide mixture was analyzed by HPLC under the same conditions as before and shown to contain only a single peak. See FIG. 11, middle panel. In addition, the peptide isolated from daptomycin was mixed with a synthetic peptide of the same sequence that contained L-Asn. HPLC analysis displayed two peaks. See FIG. 11, right panel. These experiments confirm that naturally-occurring daptomycin contains D-Asn, not L-Asn.

[0336] From the experiments presented in Examples 2-7, the organization of the daptomycin NRPS was determined. FIG. 12 shows the organization of dptA, dptBC, and dptD. dptA contains five modules (modules 1-5), dptB contains 6 modules (modules 6-11), and dptD contains two modules (modules 12-13) and a thioesterase domain. Table 4 summarizes the correspondence between the 13 modules, their domains, the dpt genes, and their cognate amino acids. “C” represents a catalytic domain, “A” represents an adenylation domain, “T” represents a thiolation domain, “E” represents an epimerase domain, and “Te” represents a thioesterase domain.

TABLE 4

| | Cognate | | |
|---|---|---|---|
| | Amino | | |
| Module | Acid | Domains | Gene |
| 01 | L-Trp | CAT | dptA |
| 02 | D-Asn | CATE | dptA |
| 03 | L-Asp | CAT | dptA |
| 04 | L-Thr | CAT | dptA |
| 05 | Gly | CAT | dptA |
| 06 | L-Orn | CAT | dptBC |
| 07 | L-Asp | CAT | dptBC |
| 08 | D-Ala | CATE | dptBC |
| 09 | L-Asp | CAT | dptBC |
| 10 | Gly | CAT | dptBC |
| 11 | D-Ser | CATE | dptBC |
| 12 | L-MG | CAT | dptD |
| 13 | Kyn | CAT-Te | dptD |

### EXAMPLE 7

### Transformation of Streptomyces lividans with the Daptomycin Gene Cluster from Streptomyces roseosporus

[0337] E. coli cells containing the BAC DNA from clone B12:03A05 (see Example 2) were grown in 5 mL of Luria broth (LB; Difco) with agitation (250 rpm) overnight at 37° C. The BAC DNA was isolated by a standard alkaline lysis procedure (see Sambrook et al., supra, “Small scale preparation of plasmid DNA”).

[0338] S. lividans TK64 spores were used to inoculate 25 mL of YEME+sucrose media and the culture was incubated for 40 hours at 30° C. The cultures were then harvested and the mycelium was pelleted away from the supernatant and washed several times with P-buffer (Practical Streptomyces Genetics; Tobias Kieser, Mervyn J. Bibb, Mark J. Buttner, Keith F. Chater and David Hopwood (John Innes Foundation, Norwich, 2000) (“Practical Streptomyces Genetics”). Fresh protoplasts were prepared according to the method described in Practical Streptomyces Genetics, supra (p. 56) and aliquoted into 0.5 mL portions (approximately 10⁸-10⁹ protoplasts) and pelleted by centrifugation at 3000 rpm for 7 minutes. Most of the supernatant was removed, leaving the pellet and approximately 50 μL of the supernatant. The pellet was resuspended in the remaining supernatant, to which was added 5 μL of BAC DNA from clone B12:03A05 (50 ng/μL in TE). This suspension was gently mixed before and after adding 350 μL of a 25% PEG-1000 in P-buffer solution (Practical Streptomyces Genetics, supra).

[0339] The protoplast suspension mixture was spread, in equal amounts, onto three dried R5T plates (dried to lose approximately 15% of their original weight; see Practical Streptomyces Genetics, supra). Inoculated plates were incubated overnight at 30° C. After 16-18 hours of growth, the plates were overlaid with 3 mL of an apramycin solution (1 mg/mL) in 20% glycerol to provide a final concentration of approximately 100 μg/mL on each plate, and the plates incubated at 30° C. After three days, the plates were determined, by examination, to contain colonies which were growing in the presence of the apramycin selection. Two colonies were picked and streaked onto two F10A agar plates (2.5% agar, 0.3% calcium carbonate, 0.5% distillers solubles, 2.5% soluble starch, 0.5% yeast extract, 0.2% dextrose and 0.5% bactopeptone; suspended in 1 L deionized and autoclaved water) containing 100 μL/mL of apramycin and allowed to incubate at 30° C. until the colonies sporulated. Spores were harvested according to the methods described in Practical Streptomyces Genetics, supra and stored as 20% glycerol suspensions at −20° C.

[0340] The spores derived from the transformation of S. lividans with BAC DNA containing the daptomycin gene cluster (from clone B12:03A05, CBUK136742) were grown in an appropriate medium and analyzed by high pressure liquid chromatography (HPLC) and LC-MS to determine if they produced a wild-type lipopeptide profile (see Example 9).

### EXAMPLE 8

### Fermentation of Streptomyces lividans TK64 Clone Containing the Daptomycin Gene Cluster

[0341] Spores of the Streptomyces lividans TK64 clone containing the daptomycin gene cluster (from clone B12:03A05) were harvested by suspending a 10 day old slant culture of medium A (2% irradiated oats (Quaker), 0.7% tryptone (Difco), 0.2% soya peptone (Sigma), 0.5% sodium chloride (BDH), 0.1% trace salts solution, 1.8% agar no. 2 (Lab M), 0.01% apramycin (Sigma)) in 5 mL 10% aqueous glycerol (BDH)). 1 mL of this suspension, in a 1.5 mL cryovial, comprises the starting material, which was retrieved from storage at −135° C. A pre-culture was produced by aseptically placing 0.3 mL of the starting material onto a slope of medium A1 and incubating for 9 days at 28° C.

[0342] A seed culture was generated by aseptically treating the pre-culture with 4 mL of a 0.1% Tween 80 (Sigma) solution and gently macerating the slope surface to generate a suspension of vegetative mycelium and spores. A two mL aliquot of this suspension was transferred into a 250 mL baffled flask containing 40 mL of nutrient solution S (1% D-glucose (BDH), 1.5% glycerol (BDH), 1.5% soya peptone (Sigma), 0.3% sodium chloride (BDH), 0.5% malt extract (Oxoid), 0.5% yeast extract (Lab M), 0.1% Junlon PW100 (Honeywell and Stein Ltd), 0.1% Tween 80 (Sigma), 4.6% MOPS (Sigma) adjusted to pH 7.0 and autoclaved)) and shaken at 240 rpm for 44 hours at 30° C.

[0343] Production cultures were generated by aseptically transferring 5% of the seed culture to baffled 250 mL flasks containing 50 mL medium P (1% glucose (BDH), 2% soluble starch (Sigma), 0.5% yeast extract (Difco), 0.5% casein (Sigma), 4.6% MOPS (Sigma) adjusted to pH 7 and autoclaved)) and shaken at 240 rpm for up to 7 days at 30° C.

### EXAMPLE 9

### Purification and Analysis of the A21978C Lipopeptides from Fermentations of the Streptomyces lividans TK64 Clone Containing the Daptomycin Gene Cluster

[0344] Production cultures described in Example 8 were sampled for analysis by aseptically removing 2 mL of the whole culture and centrifuging for 10 minutes prior to analysis. Volumes up to 50 microlitres of the supernatant were analyzed to monitor for production of the native lipopeptides (A21978C) as produced by Streptomyces roseosporus. This analysis was performed at ambient temperature using a Waters Alliance 2690 HPLC system and a 996 PDA detector with a 4.6×50 mm Symmetry C8 3.5 μm column and a Phenomenex Security Guard C8 cartridge. The gradient initially holds at 90% water and 10% acetonitrile for 2.5 minutes, followed by a linear gradient over 6 minutes to 100% acetonitrile. The flow rate is 1.5 mL per minute and the gradient is buffered with 0.01% trifluoroacetic acid. By day 2 of the fermentation, production of three of the native lipopeptides, C1, C2 and C3, with UV/visible spectra identical to that of daptomycin, was evident, as shown by HPLC peaks with retention times of 5.62, 5.77 and 5.90 minutes (λmax 223.8, 261.5 and 364.5 nm) under the analytical conditions stated, as shown in FIG. 5A. The lipopeptides then remained evident in the fermentation at each sample point during the 7-day period. Total yields of lipopeptides C1, C2 and C3 ranged from 10-20 mg per liter of fermentation material.

[0345] Liquid chromatography-mass spectrometry (LC-MS) analysis was performed on a Finnigan SSQ710c LC-MS system using electrospray ionization in positive ion mode, with a scan range of 200-2000 daltons and 2 second scans. Chromatographic separation was achieved on a Waters Symmetry C8 column (2.1×50 mm, 3.5 μm particle size) eluted with a linear water-acetonitrile gradient containing 0.01% formic acid, increasing from 10% to 100% acetonitrile over a period of six minutes after a initial delay of 0.5 minutes, then remaining at 100% acetonitrile for a further 3.5 minutes before re-equilibration. The flow rate was 0.35 mL/minute and the method was run at ambient temperature.

[0346] The identification of the three native lipopeptides was confirmed, as indicated by molecular ions ([M+H]⁺) at m/z of 1634.7, 1648.7 and 1662.7, which is in agreement with the masses reported for the major A21978C lipopeptide metabolites C1, C2 and C3, respectively, produced by Streptomyces roseosporus (Debono et al., J. Antibiotics, 40, pp. 761-777 (1987)).

[0347] Similar experiments were performed using the BAC clones 01G06, B12:06A12, B12:12F06 and B12:18H04. None of the S. lividans cells containing any one of these BAC clones was able to produce daptomycin.

### EXAMPLE 10

### Fed-Batch Fermentation of Streptomyces lividans TK64 Clone Containing the Daptomycin Gene Cluster for the Production of Daptomycin

[0348] Cells of the Streptomyces lividans TK64 clone containing the daptomycin gene cluster (from clone B12:03A05) were regenerated by suspending a 10 day old slope culture of medium A (see Practical Streptomyces Genetics; 2% irradiate oats (Quaker), 0.7% tryptone (Difco), 0.2% soya peptone (Sigma), 0.5% sodium chloride (BDH), 0.1% trace salts solution, 1.8% agar no. 2 (Lab M), 0.01% apramycin (Sigma) in 5 mL 10% aqueous glycerol (BDH)). A 1.5 mL cryovial containing 1 mL of starting material was retrieved from storage at −135° C. and thawed rapidly. A pre-culture was produced by aseptically placing 0.3 mL of the starting material onto a slope of medium A and incubating for 9 days at 28° C. Material for inoculation of the seed culture was generated by aseptically treating the preculture with 4 mL of a 0.1% Tween 80 (Sigma) solution and gently macerating the slope surface to generate a suspension of vegetative mycelium and spores.

[0349] A seed culture was produced by aseptically placing 1 mL of the inoculation material into a 2L baffled Erlenmeyer flask containing 250 mL of nutrient solution S (see Practical Streptomyces Genetics, supra) shaken at 240 rpm for 2 days at 30° C.

[0350] A production culture was generated by aseptically transferring the seed culture to a 20L fermenter containing 14 liters of nutrient solution P (see Practical Streptomyces Genetics, supra). The production fermenter was stirred at 350 rpm, aerated at 0.5 vvm, and temperature controlled at 30° C. After 20 hours incubation a 50% (w/v) glucose solution was fed to the culture at 5 g/hr throughout the fermentation.

[0351] After 40 hours incubation, a 50:50 (w/w) blend of decanoic acid:methyl oleate (Sigma and Acros Organics, respectively) was fed to the fermenter at 0.5 g/hr for the remainder of fermentation. The culture was harvested after 112 hours, and the biomass removed from the culture supernatant by batch processing through a bowl centrifuge.

[0352] The biomass was discarded and the clarified fermentation broth was retained for extraction. The broth (approximately 10L) was loaded onto a 60 mm (diameter) by 300 mm (length) column of HP20 resin, which had been pre-equilibrated with water, at a rate of 100 mL/min. The column was washed with 2L of water and then with 1.5L of 80% methanol (in water) at a similar flow rate. Finally, the bound material was eluted with 2L methanol and then taken to an aqueous concentrate under vacuum. The concentrate was diluted to 1L with purified water and partitioned with ethyl acetate (700 mL) three times. The ethyl acetate fraction was analyzed and discarded, and the aqueous layer was lyophilized to a powder.

[0353] Daptomycin was isolated by high performance liquid chromatography (HPLC) using a radially compressed cartridge column consisting of two 40×100 mm Waters Nova-Pak C18 6 μm units and a 40×10 mm Guard-Pak with identical packing. Lyophilized material (150 to 200 mg) was dissolved in water and chromatographed on the columns using a gradient in which the initial conditions were 90% water and 10% acetonitrile, followed by a linear increase over 10 minutes to 20% water and 80% acetonitrile, and then immediately ramping up to 100% acetonitrile over a further minute. UV absorption at 223 nm was monitored for elution of daptomycin. The daptomycin peak eluted at about 9 minutes and was collected and combined over many repeated runs. The sample was then evaporated under vacuum and then dried in vacuo to yield 30 mg of purified compound. Only a proportion of the total material was processed.

[0354] The purified compound was first analyzed by reversed phase HPLC at ambient temperature on a 4.6×50 mm Waters Symmetry C8 3.5 μm particle size column with a Phenomenex Security Guard C8 cartridge using a Waters Alliance 2690 HPLC system and a 996 PDA detector. The column was eluted with a water-acetonitrile gradient, initially holding at 90% water for 2.5 minutes and then rising linearly over 6 minutes to 100% acetonitrile, at a flow rate of 1.5 mL/minute. The gradient was buffered with 0.01% trifluoroacetic acid. This chromatographic analysis confirmed that the retention time (5.52 mins) and the UV absorption spectrum (λₘₐₓ 223.8, 261.5, 366.9 nm) of the purified compound matched those of daptomycin. LC-MS(ESI) confirmed the molecular ion MH⁺ as 1620.6 (FIG. 5B) and the ¹H NMR (D6-DMSO) gave a good visual match with that recorded for daptomycin (FIG. 5C).

[0355] The identification of the material as daptomycin was further confirmed by ¹³CNMR experiments.

[0356] Feed-batch fermentation may also be accomplished at a larger scale, for example at 60,000 liters.

### EXAMPLE 11

### The Use of Daptomycin Genes for Yield Enhancement

[0357] Chapter 1 Duplication of a Positive Regulatory Gene

[0358] A neutral genomic site in the chromosome of Streptomyces roseosporus is identified by transposon mutagenesis with TN5097, or a related transposon, followed by fermentation analysis. The neutral site is excised from the chromosome using a restriction endonuclease that cuts outside of the neutral site and transposon, and cloned in Escherichia coli, selecting for the expression of the antibiotic resistance marker in the transposon (hygromycin resistance in the case of TN5097). An example of this approach was used to identify a neutral site in Streptomyces fradiae, the tylosin producer. See Baltz et al., Antonie van Leeuwenhoek, 71, pp. 179-187 (1997), incorporated herein by reference in its entirety. An example of identifying a neutral site in S. roseosporus is described in McHenney et al., J. Bacteriol., 180, pp. 143-151 (1998), incorporated herein by reference in its entirety.

[0359] The regulatory gene from the daptomycin gene cluster (SEQ ID NO: 109) is cloned into a plasmid within the neutral site. A suitable plasmid would be one containing an antibiotic resistance gene for the selection of primary recombinants containing single crossovers, a counter-selectable marker such as the wild type rpsL gene, a ribosomal protein gene that confers sensitivity to streptomycin (Hosted and Baltz, J. Bacteriol., 179, pp. 180-186 (1997)) for selection of recombinants containing double crossovers that insert the cloned regulatory gene, and upstream and downstream sequences, into the chromosomal neutral site, and eliminate the plasmid sequences, and a thermal sensitive replicon that would facilitate the curing of the plasmid. The double crossover is done in a host strain that is normally resistant to streptomycin because it contains a mutation in the rpsL gene. Since the wild type (streptomycin-sensitive) allele of rpsL is dominant over streptomycin resistance, recombinants expressing streptomycin resistance must have eliminated the rpsL gene on the plasmid by a double crossover in the two arms of the neutral site, thus inserting the cloned daptomycin regulatory gene into the chromosome. Recombinants are fermented to verify that they produce an increased yield compared to the parental strain lacking the cloned daptomycin regulatory gene.

[0360] Duplication of ABC Transporter Genes

[0361] One or more of the ABC transporter genes from the daptomycin gene cluster, including upstream and downstream sequences, are cloned into the neutral site vector described above and inserted by double crossover into the S. roseosporus chromosome as described in Example 11A. Recombinants are fermented to verify that they produce increased levels of daptomycin compared to the parental strain lacking the cloned ABC transporter genes.

[0362] Duplication of novA,B,C Homologs

[0363] The segment of DNA containing the novA, B, C homology from the daptomycin gene cluster, including the upstream and downstream sequences, is cloned into the neutral site vector and inserted by double crossover into the S. roseosporus chromosome as described in Example 11A. Recombinants are fermented to verify that they produce increased levels of daptomycin compared to the parental strain lacking the cloned novA, B, C genes.

[0364] Duplication of Daptomycin Biosynthetic Genes

[0365] The daptomycin biosynthetic genes, dptA, dptBC, dptD, dptE, dptF, dptG and dptH, including the fatty acyl-CoA ligase, the three subunits of the NRPS, the integral thioesterase of dptD and the free thioesterase of dptH, are cloned into a BAC vector that contains the phiC31 attachment and integration functions (att/int) and oriT from plasmid RK2 (Baltz, Trends in Microbiol., 6: 76-83 (1998), incorporated herein by reference in its entirety) for conjugation from E. coli to S. roseosporus. The BAC containing the daptomycin genes is introduced into S. roseosporus by conjugation from E. coli S17.1, or a strain containing a self-replicating plasmid RK2 (Id.). Alternatively, the BAC vector inserts into the chromosome by homologous recombination into the daptomycin gene cluster. Recombinants are fermented to verify that they produce increased levels of daptomycin compared to the parental strain lacking the cloned daptomycin genes.

[0366] Duplication of Daptomycin Thioesterase Genes

[0367] The daptomycin gene cluster (SEQ ID NO: 1) contains at least two genes (dptD and dptH) having open reading frames (SEQ ID NO: 3 and SEQ ID NO: 6, respectively) or domains thereof that encode amino acid sequences which include conserved sequence motifs characteristic of proteins having thioesterase activity. See SEQ ID NO:7 and SEQ ID NO:8 for DptD and DptH amino acid sequences, respectively. Either one (or both) of these thioesterase genes or the thioesterase domains thereof can be duplicated by following the procedure of Example 11A, above.

[0368] A segment of DNA containing the dptD ORF sequences (e.g., SEQ ID NO: 1; SEQ ID NO: 3) optionally linked in an operative fashion to an expression control sequence (such as the natural one in SEQ ID NO: 1 or 2) and optionally including the upstream and downstream sequences, is cloned into a neutral site vector and inserted by double crossover into the S. roseosporus chromosome as described in Example 11A. Recombinants are fermented to verify that they produce increased levels of daptomycin compared to the parental strain lacking the cloned dptD gene.

[0369] Similarly, a segment of DNA containing the dptH ORF sequences (e.g., SEQ ID NO: 4, SEQ ID NO: 6) optionally linked in an operative fashion to an expression control sequence (such as the natural one in SEQ ID NOS: 1, 4 or 5) and optionally including the upstream and downstream sequences, is cloned into a neutral site vector and inserted by double crossover into the S. roseosporus chromosome as described in Example 11A. Recombinants are fermented to verify that they produce increased levels of daptomycin compared to the parental strain lacking the cloned dptH gene.

[0370] Other suitable hosts (i.e., those having NRPS or PKS multienzyme complexes) may be transformed with segments of DNA encoding proteins from the daptomycin gene cluster having thioesterase activity for improved peptide production. Alternatively, polypeptides encoded by such segments of DNA may be introduced into S. roseosporus or said other suitable hosts by protein transfer techniques well-known to those of skill in the art.

[0371] Duplication of Daptomycin Resistance Genes

[0372] The daptomycin resistance gene(s) are identified by cloning and expression in an appropriate streptomycete host that is naturally susceptible to daptomycin. The cloned daptomycin resistance gene(s) are inserted into the neutral site vector within the neutral site, and inserted into the S. roseosporus chromosome by double crossover as described in Example 11A. Recombinants are fermented to verify that they produce increased levels of daptomycin compared to the parental strain lacking the cloned daptomycin resistance genes.

[0373] Duplication of Daptomycin Biosynthetic Genes and Accessory Genes

[0374] The BAC clone B12:03A05 was introduced into wild-type Streptomyces roseosporus A21978.6 (ATCC Deposit No. 31568, CBUK 136737) and Streptomyces roseosporus A21978.65 (NRRL Deposit No. 15998, CBUK 136879) by conjugation as described in Practical Streptomyces Genetics, supra, to create exconjugants, CBUK 136927 and CBUK 138016, respectively. The parent and the exconjugant strains were fermented as described in Example 8 in triplicate in medium P to which 0.1% each of filter sterilized glutamic acid, Na salt (BDH) ornithine (Sigma) and aspartic acid (Sigma) were added.

[0375] Cultures were sampled and analyzed by HPLC during a 10 day experiment. The HPLC was performed as described in Example 9 except that only 5 μL of the supernatant was injected. By 40-56 hours after commencing fermentation, production of three of the S. roseosporus native lipopeptides (A21978C1, A21978C2 and A21978C3) was clearly evident. These lipopeptides were present in the fermentation at every subsequent sample point, with diversification to other A21978C factors evident at the end of the time course. Averaged over the three fermentation replicates, the maximum yields of A21978C lipopeptides produced by the exconjugates CBUK 136927 (284 mg/L) and CBUK138016 (1488 mg/L) were approximately twice that produced by the parent strains CBUK 136737 (143 mg/L) and CBUK 136879 (726 mg/L), respectively.

### EXAMPLE 12

### The Use of Daptomycin Biosynthetic Genes to Produce Novel Products

[0376] A. Modification of the Peptide Structure by Site-Directed Mutagenesis of an Amino Acid Specificity Code: Conversion of Position 2 D-Asn to D-Asp.

[0377] The amino acid specificity codes for the thirteen amino acids in daptomycin are shown in Table 1 (see Example 6, above). See also Stachelhaus et al., Chem. Biol., 6, pp. 493-505 (1999), incorporated herein by reference in its entirety, for a discussion of identifying and altering adenylation domain amino acid specificity codes in NRPSs. The code for all three L-asp residues in positions 3, 7, and 9 of daptomycin are identical: DLTKLGAV (where the letters indicate standard amino acid abbreviations). The code for D-Asn in position 2 is DLTKLGDV, and it differs by a single amino acid (a D instead of A in position 7). The D-Asn specificity code is changed to that specifying D-Asp by making a site specific change in the adenylation domain of module 2 in PS I.

[0378] The mutant version of module 2 is inserted into the S. roseosporus chromosome by gene replacement (see Example 11). A counter selectable marker (e.g., the wild type rpsL gene) is inserted into the adenylation domain of module 2 by gene replacement. The mutant module 2 adenylation domain containing the coding sequence for D-Asp, and containing flanking DNA (about 1 to 5 kb on each side of the specificity code) on an appropriate thermal sensitive plasmid is introduced into the S. roseosporus strain disrupted for daptomycin biosynthesis. Recombinants containing single crossovers are selected at the non-permissive temperature by selection for an antibiotic resistance marker on the plasmid (e.g., hygromycin, apramycin or thiostrepton resistance). If the host strain is streptomycin resistant by a mutation in the chromosomal rpsL gene, then the second crossover completing the gene replacement can be selected for streptomycin resistance. The recombinant is screened for antibiotic production. The novel derivative of daptomycin is separated and analyzed to confirm the structure according to methods described, e.g., in U.S. Pat. Nos. RE 32,333, RE 32,455, 4,874,843, 4,482,487, 4,537,717, and 5,912,226.

[0379] B. Molecular Exchange of an Amino Acid Coding Module for one of Different Amino Acid Specificity.

[0380] Daptomycin has four acidic amino acids: three L-asp residues at positions 3, 7, and 9, and a 3-methyl-Glu (3-MG) at position 12 (see Table 1, Example 6). Novel derivatives of daptomycin are generated by exchanging the adenylation domain that specifies 3-MG for one that specifies L-asp. The adenylation domain of the 3-MG module is inserted into segments of the L-asp module flanking the L-asp adenylation domain which has been removed by molecular genetic procedures. The hybrid 3-MG module containing the flanking DNA from an L-asp module is inserted into an appropriately constructed gene replacement vector, and the hybrid module is exchanged for an L-asp module by homologous double crossover as in Example 11A. This same procedure is repeated for the other two L-asp modules. The recombinants produce three novel derivatives of daptomycin containing 3-MG substituted for L-asp in positions 3, 7, or 9, and maintain the overall four negative charges in the molecule.

[0381] C. Exchange of a Non-Ribosomal Peptide Synthetase (NRPS) Subunit for one that Catalyzes the Incorporation of Different Amino Acid(s).

[0382] The gene that encodes the third subunit of the daptomycin NRPS (see Table 1, Example 6) contains two modules that encode the specificity for incorporation of amino acids 12 (3-MG) and 13 (L-kyn). The gene that encodes the third subunit for the biosynthesis of the cyclic lipopeptide CDA (Kempter et al., Angew. Chem. Int. Ed. Engl., 36, pp. 498-501 (1997); Chong et al., Microbiology, 144, pp. 193-199 (1998); each of which is incorporated by reference herein in its entirety) also encodes the last two amino acids, in this case amino acids 10 (3-MG) and 11 (L-trp). A derivative of daptomycin containing L-trp instead of L-kyn in position 13 is generated by disrupting gene dptD, and by replacing it with the gene that encodes PSIII for CDA. Expression of the PSIII gene from a strong promoter (e.g., the ermEp* promoter; Baltz, Trends Microbiol., 6, pp. 76-83 (1998), incorporated herein by reference in its entirety), and inserted into a neutral site in the S. roseosporus genome as described in Example 11A, allows CDA PSIII to complement the dptD mutation and results in the production of the altered daptomycin with L-trp replacing L-kyn. The recombinant is fermented and the product(s) of the recombinant are analyzed by LC-MS as described in Example 9.

[0383] Similar manipulations can be performed for trans-complementation for other subunits, i.e. to generate a disruption or deletion in a subunit of the daptomycin biosynthetic gene cluster, and then complement in trans by one or more natural or modified subunits from an NRPS (the latter can include trans-complementation by modified versions of daptomycin biosynthetic gene cluster subunits, such as can be generated using methods described throughout example 12, especially examples 12A, 12B or 12H, 12J). Trans-complementation between the NRPS subunits then leads to production of a novel nonribosomal peptide which can be analysed for as described in previous examples.

[0384] To perform a trans-complementation experiment using portions of the daptomycin biosynthetic gene cluster and the calcium dependent antibiotic (CDA) biosynthetic gene cluster, the set of daptomycin biosynthetic genes, or the set of daptomycin biosynthetic genes and accessory genes, such as those contained on the BAC clone B12:03A05 are introduced by transformation or conjugation into other natural or engineered strains or species of actinomycetes. The recipients may be known producers of secondary metabolites or uncharacterized strains, or may be generated by recombinant techniques to carry biosynthetic pathways other than that for biosynthesis of daptomycin. The transformants or ex-conjugants are fermented in a variety of media and whole broth or extracts thereof are screened for either novel daptomycin-like compounds or biological activity against daptomycin-resistant tester organisms.

[0385] In some instances, complementation is faciliated by inactivation of some of the genes in the daptomycin biosynthetic pathway. Sequences encoding a subunit of the NRPS in the BAC B12:03A05 can be deleted or replaced by a marker gene to form a modified B12:03A05 before introduction into a heterologous host that already expresses one or more native or introduced NRPS gene clusters. Enzyme subunits encoded by the modified B12:03A05 clone and by endogenous host NRPS genes may then associate in the cytoplasm to form a heteromeric multienzyme complex that leads to production of a novel peptide. In other cases, a deletion may be created after B12:03A05 or a portion comprising the daptomycin NRPS is introduced into a heterologous host that already expresses one or more native or introduced NRPS gene clusters. For example, a dptD-disrupted or -deleted version of B12:03A05 can be created in a strain of S. lividans into which B12:03A05 has been introduced. S. lividans carries a native copy of the gene cluster for CDA. The resulting strain is fermented and analyzed to show that complementation between the CDA PS III and the modified B12:03A05 leads to production of a derivative of daptomycin containing L-trp instead of L-kyn in position 13. In one embodiment of this example, it was shown that a novel lipopeptide could be produced by trans-complementation using the S. lividans TK64/B12:03A05 strain described in Example 7.

[0386] To produce the novel lipopeptide, homologous recombination across flanking DNA sequences was used to exchange the bulk of the coding region of dptD in S. lividans TK64/B12:03A05 for a heterologus marker gene. To perform the homologous recombination, two fragments comprising the regions directly upstream (“5′ fragment)” and downstream (“3′ fragment”) of dptD were amplified from chromosomal S. roseosporus DNA using the following primer sets with 5′-terminal extensions in which unique restriction sites have been introduced (underlined):

| | |
|---|---|
| 5′ fragment (1122 bp): | |
| 5′ GCG AAG CTT CTG GTG GCG CAT CAC | (SEQ ID NO: 156) |
| CTG G 3′ | |
| 5′ GCT CTA GAT GGA AGT ATG TCC TCC | (SEQ ID NO: 157) |
| ATC GC 3′ | |
| 3′ fragment (1535 bp): | |
| 5′ CGG ATC CCG CCG GCA CCT GAC | (SEQ ID NO: 158) |
| CC 3′ | |
| 5′ CCG AAT TCC GCC TCC GAG TAC ATC | (SEQ ID NO: 159) |
| GAG G 3′ | |

[0387] The amplified fragments were cloned in succession into the corresponding unique sites in the multiple cloning site of pNEB193 (New England Biolabs). The resulting construct, pSD002, was confirmed by restriction digest analysis for orientation, and by sequencing for the absence of errors in the portions generated by PCR. A SpeI fragment containing the marker gene, ermE (erythromycin resistance gene; see Hopwood, supra) was inserted into pSD002 at an XbaI site and verified by restriction digest analysis. The resulting plasmid, pSD005, thus includes a cassette composed of ermE flanked by DNA stretches homologous to DNA sequences upstream and downstream of dptD. Once inserted into the daptomycin biosynthetic gene cluster pathway by homologous recombination, this cassette would essentially replace all of dptD, except for the first 31 bp and the last 12 bp, with ermE. The region comprising the replacement cassette was then subcloned into a vector (a cloning site-modified version of pRHB538; Hosted et al., J. Bacteriol. 179: 180-186, 1997) carrying a temperature-sensitive replication origin and rpsL (a gene conferring sensitivity to streptomycin that can be used in a TK64 background) to create pSD030, the final plasmid in the series for introduction into S. lividans.

[0388] The plasmid, pSD030, was introduced into S. lividans by protoplast transformation essentially as described above in Example 7. The transformation mix of protoplasts and cells was gently spread over R2Yc plates and incubated at 30° C. for approximately 16 hours. Each plate was then flooded with 1 mL of water containing 1.25 mg of erythromycin, resulting in a final concentration of 50 μg/ml once the liquid was absorbed into the media. Erythromycin-resistant colonies arising on the transformation plate after 7 days were inoculated into 25 mL of TSB (Hopwood, supra) plus erythromycin and incubated at 30° C. for 48 hours. The mycelium was harvested, and 1/10th of the mycelial mass was macerated and transferred to a new aliquot of 25 mL TSB plus erythromycin. The resultant solution was then incubated at 40° C. to select against the temperature-sensitive replicon of pSD030. After 48 hours, the mycelium was harvested by centrifugation, macerated and resuspended in a final volume of 2 mL TSB. 100 μL of this suspension was spread on SPMR plates (Babcock et al., J. Bacteriol. 170: 2802-2808, 1988) containing 50 μg/mL erythromycin and 30 μg/mL of streptomycin. Colonies that survived were screened and shown to have the correct genotype by PCR to identify strains such as CBUK 137860, in which ermE had successfully replaced dptD.

[0389] Starting material of CBUK 137860 was prepared essentially as described in Example 10 and used to produce a seed culture. The production culture was also generated essentially as described in Example 10, but the aeration was at 0.7 vvm. The pH of the fermenter was computer controlled at 6.50 with a 14% (v/v) ammonium hydroxide solution. A 50% (w/v) glucose solution was fed to the culture at 0.36 g/L/hr throughout the fermentation.

[0390] The biomass from the 20 L fermentation was discarded and the clarified liquor was applied to an open glass column, packed with Mitsubushi HP20 resin (60×300 mm) and conditioned with methanol and water. Prior to elution, the column was washed with 2 L of water followed by 2 L of methanol/water (1:4). The column was then eluted with 2 L of methanol/water (4:1) followed by 1 L methanol, and collected as two separate fractions.

[0391] Liquid chromatography-mass spectroscopy (LC-MS) electrospray ionization (ESI) analysis indicated that both fractions contained the A21978C/CDA hybrid molecules, and the less complex methanol/water (4:1) fraction was processed further. This was evaporated under vacuum to an aqueous residue and then made up to 500 mL with water. It was then back extracted with 3×500 mL of ethyl acetate in a 2 L separating funnel, to give an aqueous and organic fraction. LC-MS (ESI) indicated that the hybrid molecules were absent from the organic phase and it was discarded. The aqueous fraction was lyophilized overnight.

[0392] The hybrid molecules were purified by preparative high performance liquid chromatography (HPLC) using a Waters Prep LC system and a Waters 40×200 mm Nova-Pak C18 60Å6 μm radially-compressed double cartridge with 40×10 mm guard. The freeze-dried material was dissolved in water and purified using a gradient method. This method held at 90% water and 10% acetonitrile for 2 minutes and was followed by a linear gradient over 13 minutes to 25% water and 75% acetonitrile. The flow was 55 mL/min and the whole gradient was buffered with 0.04% trifluoroacetic acid. Fractions were collected and analyzed by LC-MS on a Finnigan SSQ710c LC-MS system using electrospray ionisation (ESI) in positive ion mode, with a scan range of 200-2000 daltons and 2 second scans. Chromatographic separation for this LC-MS analysis was achieved on a Waters Symmetry C8 column (4.6×50 mm, 3.5 μm particle size) eluted with a linear water-acetonitrile gradient containing 0.01% formic acid, increasing from 10% to 100% acetonitrile over a period of six minutes after a initial delay of 0.5 minutes, then remaining at 100% acetonitrile for a further 3.5 minutes before re-equilibration. The flow rate was 1.5 mL/minute and the method was run at ambient temperature.

[0393] The analysis identified the A21978C/CDA hybrids as the expected analogues of the native A21978C lipopeptides A21978C1, with a branched native C₁₁ acyl chain, and A21978C2, with a branched C₁₂ acyl chain, in which the native kynurenine residue is replaced with a tryptophan residue. Both fractions required further purification prior to NMR studies. The C₁₁ hybrid (A) was further purified using an isocratic method with 60% water and 40% acetonitrile buffered with 0.04% trifluoroacetic acid. 1.8 mg of material was isolated. The C₁₂ hybrid (B) final purification step used an isocratic method with 58% water and 42% acetonitrile buffered with 0.04% trifluoroacetic acid. Approximately 1.5 mg of material was isolated. A 1H NMR spectrum is shown in FIG. 13. The UV maxima and ESI-MS molecular ion information (doubly-charged ions observed in negative ion mode) for A and B are presented below:

| | A | B |
|---|---|---|
| ESI -MS (m/z) | 814 (M-2H)²⁻ | 821 (M-2H)²⁻ |
| UV-vis λₘₐₓ/nm | 221, 280, | 221, 280 |

[0394] Similar experiments where modified versions of the daptomycin NRPS (e.g. dptA deletion, dptA plus dptD deletion, etc.) are introduced into other secondary metabolite producing strains such as S. lividans, S. fradiae, S. viridochromogenes and others may also generate derivative compounds based on the daptomycin backbone. Given that NRPS subunits can be expressed separately and exchanged, one may trans-complement or exchange all subunits, alone or in combination, with one or more natural or modified NRPS subunits (including modified versions of daptomycin synthetase as described above) in S. roseosporus or other expressing hosts. As an example, the following modified S. roseosporus strain can be created: dptA and dptD deleted from the native locus, dptBC expression intact. Then, this strain can be complemented by an ectopically integrated dptA that is modified by site-directed mutagenesis to incorporate asp instead of asn at position 2 (Example 12A) and an ectopically integrated dptD modified so that its kyn-accepting module is exchanged for the trp-accepting module of CDA PSIII or by an ectopically integratd CDAIII. Another way to create the same strain is to bring a dptA, dptD deleted BAC B12:03A05 into a S. lividans TK64 derivative that already carries a modified dptA subunit that incorporates aspartate instead of asparagine. Such strains may be fermented to recover a daptomycin derivative with asp in position 2, and trp in position 13.

[0395] D. Insertion of One or More Modules to Cause the Expansion of the Daptomycin Ring or Lengthening of the Tail.

[0396] A simple NRPS elongation module may be defined as comprising domains “C-A-T” (condensation-, adenylation- and thiolation-domains). To link modules, and to identify a permissive site within the daptomycin NRPS in which to insert additional internal modules, the domain and inter-domain regions are examined for sequences indicative of flexible “linker” sequences. See, e.g., Mootz et al., Proc. Natl. Acad. Sci. U.S.A., 97, pp. 5848-5853 (2000), which is incorporated herein by reference in its entirety. Sequences encoding an additional module are inserted in the linker sequence between an upstream T-domain and a downstream C-domain using well-known genetic recombination techniques, e.g., see Example 11A, above.

[0397] Isolation of the module DNA is obtained from the chromosomal DNA extracted from the producer organism. Various isolation techniques can be used such as, cutting the chromosomal DNA with restriction enzymes and isolating a fragment coding for the module(s) of interest after it is identified by means of Southern blot or isolation of the module(s) of interest by e.g. genetic amplification (PCR) using suitable primers. Sequencing and characterization of the amplified fragments as well as cloning can be performed according to conventional techniques. New modules can be inserted between the modules specifying L-Thr and Gly in dptA; between the modules specifying L-Orn and L-Asp or L-Asp and D-Ala in dptBC; between L-Asp and Gly or Gly and D-Ser in dptBC; and between modules specifying 3-MG and L-Kyn in dptD to expand the ring of daptomycin. New modules can be inserted in the dptA gene between the modules specifying L-Trp and D-Asn, D-Asn and L-Asp, or L-Asp and L-Tyr to lengthen the tail of daptomycin. The module(s) insertions can be carried out using the methods for double crossovers described in Example 11A.

[0398] E. Insertion of an Additional Carboxyl Terminus Module Adjacent to and Upstream from the Thioesterase Module.

[0399] Carboxy-terminal thioesterase domains (“Te-domains”) of a variety of NRPSs and PKSs can cleave (i.e., catalyze chain termination) non-natural peptide and polyketide substrates. See Mootz et al., supra; see also de Ferra et al., J. Biol. Chem., 272, 25304-25309 (1997); each of which is hereby incorporated by reference in its entirety. Te-domains can act as hydrolases, releasing a linear product, or as cyclases, releasing cyclic peptides. Evidence suggests that a Te-domain which functions as a cyclase in its natural configuration within a NRPS or PKS may, nonetheless, function as a hydrolase when engineered into new modular configurations. (An isolated C-terminal Te-domain has been shown to catalyze cyclization on various substrates as long as key “recognition amino acids” are at the C- and N-termini of the substrate; see Trauger et al., Nature, 407, pp. 215-218, 2000.

[0400] It has also been shown that some C-terminal Te-domains function best, when moved, by retaining their association with a portion of the protein domain occurring directly upstream in the natural NRPS or PKS modular configuration. See Guenzi et al., J. Biol. Chem., 273, pp. 14403-14410 (1998), incorporated herein by reference in its entirety. It is possible that retaining the boundary between the Te-domain and a portion of the domain directly upstream (N-terminal) may also contribute to retaining cyclase function of the Te-domain within a new modular configuration.

[0401] Accordingly, to insert an additional module upstream from a Te-domain and have it be operatively linked thereto, one can identify linker sequences between the C-A-T modules and the C-terminal Te-domain, as described above, and insert sequences encoding the additional module therein, using standard genetic manipulations. Optionally, one can engineer a new, hybrid C-terminal Te-domain in which the C-terminal portion of the penultimate thiolation (T-) domain remains linked (or is otherwise grafted) to the Te-domain (“T-/Te-domain”). See Guenzi et al., 1998, supra. Sequences encoding the additional module are then inserted within the identified linker region upstream from a hybrid T-/Te domain using well-known genetic recombination techniques, as described in Example 11A, above.

[0402] F. Internal Deletion of One or More Modules to Cause the Contraction of the Daptomycin Ring or Shortening of the Tail.

[0403] To obtain a deletion of an internal module(s) on the chromosome by double crossing-over and selection on antibiotic plates it is necessary to prepare a plasmid containing a fragment of chromosomal DNA situated upstream from the module to be deleted fused by ligation to a fragment downstream of the module(s) to be deleted. The plasmid also carries a wild type rpsL gene to confer streptomycin sensitivity on recombinants in a streptomycin-resistant genetic background (see Example 11A), an antibiotic resistance gene (e.g., apramycin resistance, thiostrepton resistance or hygromyicin resistance) for selection of single crossovers, and a temperature sensitive replicon that can be cured at elevated temperature. A single crossover inserting the plasmid by homologous recombination into the region of DNA upstream of the module(s) to be exchanged can be selected for antibiotic resistance at elevated temperature. The second crossover that deletes the module(s) can then be selected on media containing streptomycin (thus eliminating all plasmid sequences). Recombinants containing deletions of the appropriate module(s) can be verified by Southern blot hybridization of S. roseosporus DNA cleaved with appropriate restriction endonucleases. This approach can be taken to delete the L-Asp module or the Gly module from dptBC, for example. It can also be used to delete the modules in the dptA gene specifying L-Asn, L-Asp or both L-Asn and L-Asp together.

[0404] G. Translocation of the Terminal Thioesterase Module to Cause the Contraction of the Daptomycin Ring.

[0405] Sequences encoding the thioesterase (Te) region which resides at the carboxyl terminus of the last module in the daptomycin NRPS (DptD) may be translocated upstream to the end of an internal module encoding region. This translocation will result in the release of a defined shortened product that will yield a truncated linear or cyclic peptide. The translocation of the Te can be accomplished by double crossovers much the same way as described above in Examples 12A and 12F.

[0406] Molecular Exchange Between Daptomycin NRPS and Other NRPS or PKS Genes

[0407] a. Daptomycin Thioesterase onto Different NRPS or PKS

[0408] Using well-known molecular and genetic methods such as those described above, sequences encoding a C-terminal Te-domain of the daptomycin NRPS of the invention (e.g., DptD) may be moved (either alone or in combination with one or more upstream modules or portions thereof) into association with sequences encoding other NRPS or PKS modular genes from a variety of other hosts to produce hybrid modular synthetases that are capable of producing new peptide and/or hybrid peptide/polyketide products having useful properties. See, e.g., Stachelhaus et al., Science, 269, pp. 69-72 (1995) and Cane and Khosla, Chem. Biol., 6, pp. 319-325 (1999); each of which is incorporated herein by reference in its entirety. Similarly, daptomycin sequences encoding a free thioesterase of the invention (e.g., DptH) may be moved into association other NRPS or PKS encoding modular genes to produce hybrid modular synthetases.

[0409] b. Module and Domain Exchanges Between Daptomycin and Other NRPS and/or PKS

[0410] Various sequences derived from the daptomycin biosynthetic gene cluster of the invention—including but not limited to domains and modular structures—may be used to construct plasmids and other vectors for use in genetic recombination reactions (gene duplication, conversion, replacement, etc.) between daptomycin sequences and natural or synthetic NRPS and PKS sequences in homologous and heterologous hosts to produce hybrid NRPS and hybrid NRPS/PKS modular synthetases comprising sequences from the daptomycin biosynthetic gene cluster. Such hybrid synthetases will produce novel peptide and polyketide products which are expected to have new and useful properties.

[0411] Creation of Lipopeptide Derivatives of Nonribosomally Synthesized Peptides that are not Normally Acylated.

[0412] The fatty acid tail of daptomycin is thought to be attached by the products of the dptE and dptF genes, working in conjunction with the condensation domain at the start of dptA. These genes and gene fragments may be transferred to the beginning of a foreign nonribosomal peptide synthase gene, or to an internal location within the daptomycin gene cluster, either at the start of a gene (e.g. 5′ of dptBC or dptD) or within a gene at the start of a module (e.g. 5′ of module 2), to create acylated versions of the foreign nonribosomally synthesized peptide, or to create acylated, truncated derivatives of daptomycin. The foreign gene may be derived from another natural organism, or one generated by recombinant techniques, e.g. various versions of daptomycin that have undergone modifications to expand or contract the ring, to have substituted amino acids in the peptide sequence as described herein.

[0413] Modification of Amino Acid Stereoisomers in the Peptide Structure.

[0414] Stereospecificity in the amino acid backbone produced by an NRPS is determined by the presence of epimerase domains in the donor module and distinctive condensation domains in the acceptor module. An alteration in stereochemistry of the amino acids may be achieved by addition of an epimerase domain to a donor module, and substitution of the appropriate condensation domain to the acceptor module. An alteration can also be made by removal of the epimerase domain from a donor module, and the substitution of the appropriate condensation domain in the acceptor, e.g. the epimerase domain can be excised from module 2 of dptA, and the condensation domain of module 3 of dptA can be exchanged for the condensation domain from another module that does not normally accept a D-amino acid. Useful epimerase and condensation domains may be found in the daptomycin cluster as well as in other nonribosomal peptide synthetase genes.

### EXAMPLE 13

### Use of Free Thioesterase

[0415] A. Expression of dptD or dptH Related Sequences in Homologous or Heterologous Systems to Increase Efficiency of Product Formation by Modular NRPSs and PKSs

[0416] The C-terminal Te-domain excised from tyrocidine synthetase has been shown to catalyze cyclization on various peptide substrates as long as key “recognition amino acids” are at the C- and N-termini of the substrate. See Trauger et al., Nature, 407, 215-218, 2000. Sequences derived from the C-terminal domain of daptomycin NRPS (e.g., dptD) may similarly be isolated and expressed—alone or in the form of suitable fusion proteins—in a homologous or heterologous host (or in vitro system) to catalyze cyclization of peptide and polyketide products which naturally (or which have been engineered to) possess key substrate recognition amino acids required for the daptomycin Te-domain to bind and join substrate ends (see below).

[0417] When isolating sequences derived from the C-terminal Te-domain of daptomycin synthetase (NRPS) for independent expression, it may be preferable to include natural C-terminal sequences from the penultimate amino acid module. See, e.g., Guenzi et al., 1998, supra. Various dptD and upstream-derived sequence combinations can be tested using techniques well-known in the art to optimize the thioesterase activity of the C-terminal Te-domain of daptomycin NRPS when expressed independently from upstream polypeptides such as DptA and/or DptBC. Independent expression of the C-terminal Te-domain of daptomycin may be accomplished using standard molecular biology techniques. Independent expression of the C-terminal Te-domain of daptomycin NRPS is accomplished by inserting sequences derived from the thioesterase domain of the dptD ORF (SEQ ID NO:3) downstream from natural daptomycin NRPS promoter sequences (SEQ ID NO:2) in an appropriately constructed expression vector. Alternatively, independent expression of the C-terminal Te-domain of daptomycin NRPS is accomplished by inserting the thioesterase domain of the dptD ORF (SEQ ID NO:3) downstream from a heterologous promoter, which is constitutively active or from a heterologous promoter which may be turned on or off in a regulated manner. Those of skill in the art will appreciate the factors to be considered in selecting appropriate promoters and vectors for expression or over-expression in a host-dependent manner.

[0418] Sequences derived from the free thioesterase domain of the daptomycin biosynthetic gene cluster of the invention (dptH) may be similarly expressed in a homologous or heterologous host to test and develop novel cyclic peptides and the like.

[0419] The key recognition amino acids of daptomycin are identified by systematic mutagenesis of the amino acid residues of daptomycin followed by cyclization assays using each modified daptomycin substrate in a reaction catalyzed by the isolated Te-domain. C- and N-terminal amino acid residues required for daptomycin cyclization are identified and engineered into new substrate backbones into which peptide and polyketide building block units can be inserted. Substrate engineering can be performed at the nucleic acid sequence level or at the peptide level using techniques well-known to those of skill in the art. The length and composition of preferred substrates may be determined empirically, taking into consideration factors well-known to the skilled worker and including (but not limited to) substrate binding efficiency, catalytic rate, biological activity of resulting cyclic product(s), and ease of purification of the final products.

[0420] B. Mutagenize dptD or dptH to Affect Proofreading Function

[0421] The dptH gene from the daptomycin gene cluster is related to free thioesterase enzymes which are known to participate in the biosynthesis of some peptide and polyketide secondary metabolites. See e.g., Schneider and Marahiel, Arch. Microbiol., 169, pp. 404-410 (1998), and Butler et al., Chem. Biol., 6, pp. 87-292 (1999), hereby incorporated by reference in their entirety. It has been suggested that editing thioesterases are often required for efficient natural product synthesis. Butler et al. have postulated that the free thioesterase found in the polyketide tylosin gene cluster may be involved in editing and proofreading functions, consistent with the suggested role of the thioesterases in efficient product formation.

[0422] Homologous or heterologous expression of the daptomycin dptH (encoding a free thioesterase) or the thioesterase-encoding domain of dptD (encoding the C-terminal Te) genes may affect the efficiency of product formation by modular NRPSs and PKSs. The proposed editing and proofreading functions of the daptomycin thioesterase type II enzyme (DptH) (and potentially of the type I thioesterase enzyme when detached from the C-terminus of the daptomycin gene cluster and separately expressed) may be altered by conventional mutagenesis and other recombinant DNA techniques, e.g., those known to affect adversely the fidelity of DNA replication. Altered and mutated forms of thioesterase genes may be expressed in appropriate expression systems and screened for those which encode thioesterase enzymes having altered biological properties. Especially desirable would be thioesterase enzymes that have higher than normal rates of amino acid misincorporation. Such mutants would be useful for creating a larger diversity of peptide and peptide/polyketide hybrid products having new and useful biological properties.

### EXAMPLE 14

### Using Daptomycin Biosynthetic Genes to Identify and Isolate Related Genes

[0423] The nucleic acid and amino acid sequences of the invention can be compared to the corresponding sequences from another lipopeptide pathway in order to identify features that can then be used to identify sequences from an NRPS or a component of an NRPS encoding another lipopeptide.

[0424] The amino acid 3-methyl glutamic acid (3MG) is uncommon, but is found in daptomycin, the calcium dependent antibiotic (CDA) from S. coelicolor, and the A54145 compound made by S. fradiae. Comparison of the S. roseosporus and S. coelicolor nucleic acid sequences that encode the 3MG adenylation domain, as well as from analogous sequences from genes that adenylate other amino acids, were used to create the primer pair P140 and P141:

| | |
|---|---|
| ACSSWSGGSGTSSCCTTCATGAA | (SEQ ID NO: 160) |
| ATGGTGTTCGAGAACTAYCC. | (SEQ ID NO: 161) |

[0425] S. fradiae cosmid library clones were screened by PCR using P140 and P141 using standard techniques. The PCR reaction yielded a nucleic acid molecule product of approximately 700 bp, whose sequence proved similar to the region encoding the 3MG adenylation domain in S. roseosporus and S. coelicolor. Extension of the sequence by primer walking confirmed that the region identified was the 3MG module in A54145.

[0426] This method was also used to identify portions of an NRPS pathway that encode condensation domains downstream of a D-amino acid activating module. D-amino acids are unusual amino acids found in non-ribosomally synthesized peptides, and primers for condensation domains associated with them can be used to identify pathways with such amino acids. The nucleic acid sequences of the S. roseosporus daptomycin and S. coelicolor CDA sequences that encode these D-amino acid condensation domains were compared to each other and to analogous sequences from other condensation domains associated with L-amino acids in order to create the primer pair P144 and P145:

[0427] P144

[0428] P145

| | |
|---|---|
| SCSCTSCAGGAGGGSHTSSTSTTCC | (SEQ ID NO: 162) |
| CCGAASACSACGTCGTCSCGSCC. | (SEQ ID NO: 163) |

[0429] S. fradiae cosmid library clones were screened by PCR using P144 and P145 using standard techniques. The PCR reaction yielded a nucleic acid molecule products of approximately 800 basepairs, the sequences of which proved to be similar to the condensation domains following the D-amino acids in S. roseosporus and S. coelicolor. Sequences corresponding to more than one domain were obtained, indicating that the pathway had more than one D-amino acid.

[0430] These approaches, based on understanding the sequence of the daptomycin pathway, can be used to develop special primer sets for other genetic features of lipopeptide pathway gene clusters, such as regions encoding epimerase domains or the condensation domain of the first adenylation module responsible for condensing the fatty acid to the peptide, as well as genes involved in acylation, such as DptE and F.

TABLE 5

| | Nucleotide | Amino Acid |
|---|---|---|
| ORF# - | Sequence | Sequence |
| Fragment | SEQ ID NO: | SEQ ID NO: |
| 1 - 90 kb* | 20 | 19 |
| 2 - 90 kb | 22 | 21 |
| 3 - 90 kb | 24 | 23 |
| 4 - 90 kb | 26 | 25 |
| 5 - 90 kb | 28 | 27 |
| 6 - 90 kb | 30 | 29 |
| 7 - 90 kb | 32 | 31 |
| 8 - 90 kb | 34 | 33 |
| 9 - 90 kb | 36 | 35 |
| 10 - 90 kb | 38 | 37 |
| 11 - 90 kb | 40 | 39 |
| 12a - 90 kb | 42 | 41 |
| 12b - 90 kb | 44 | 43 |
| 13 - 90 kb | 46 | 45 |
| 14 - 90 kb | 48 | 47 |
| 15 - 90 kb | 50 | 49 |
| 16 - 90 kb | 52 | 51 |
| 17 - 90 kb | 54 | 53 |
| 18 - 90 kb | 56 | 55 |
| 19 - 90 kb | 58 | 57 |
| 20 - 90 kb | 60 | 59 |
| 21 - 90 kb | 62 | 61 |
| 22 - 90 kb | 64 | 63 |
| 23 - 90 kb | 66 | 65 |
| 24 - 90 kb | 68 | 67 |
| 25 - 90 kb | 70 | 69 |
| 26a - 90 kb | 72 | 71 |
| 26b - 90 kb | 74 | 73 |
| 27 - 90 kb | 76 | 75 |
| 28 - 90 kb | 78 | 77 |
| 29 - 90 kb dptE | 16 | 15 |
| 30 - 90 kb dptF | 18 | 17 |
| 31 - 90 kb dptA | 10 | 9 |
| 32 - 90 kb dptB | 12 | 11 |
| 33 - 90 kb dptC | 14 | 13 |
| 34 - 90 kb dptD | 3 | 7 |
| 35 - 90 kb | 80 | 79 |
| 36 - 90 kb dptH | 6 | 8 |
| 37 - 90 kb | 82 | 81 |
| 38 - 90 kb | 84 | 83 |
| 41 - 90 kb | 105 | 104 |
| 1 - SP6 | 86 | 85 |
| 2 - SP6 | 88 | 87 |
| 3 - SP6 | 90 | 89 |
| 4 - SP6 | 92 | 91 |
| 5 - SP6 | 94 | 93 |
| 6 - SP6 | 96 | 95 |
| 7 - SP6 | 98 | 97 |
| 8 - SP6 | 100 | 99 |
| 9 - SP6 | 102 | 101 |
| 2 - GTC2 | 107 | 108 |
| 3 - GTC2 | 109 | 110 |
| 4 - GTC2 | 111 | 112 |
| 5 - GTC2 | 113 | 114 |
| 6 - GTC2 | 115 | 116 |
| 7 - GTC2 | 117 | 118 |
| 8 - GTC2 | 119 | 120 |
| 9 - GTC2 | 121 | 122 |
| 10 - GTC2 | 123 | 124 |
| 11 - GTC2 | 125 | 126 |
| 12 - GTC2 | 127 | 128 |
| 13 - GTC2 | 129 | 130 |
| 14 - GTC2 | 131 | 132 |
| 15 - GTC2 | 133 | 134 |
| 16 - GTC2 | 135 | 136 |
| *ORF-1 of the 90 kb fragment is a partial sequence of the ORF because the 3′ end of the ORF, including the stop codon, terminates in the SP6 fragment. The nucleic acid sequence of the 3′ end of the ORF-1 sequence, including the stop codon, corresponds to nucleotides | | |
| # 13020-12876 of SEQ ID NO: 103. Thus, the full open reading frame of ORF-1 of the 90 kb fragment consists of SEQ ID NO: 19 (the complementary strand of nucleotides 1635-1 of SEQ ID NO: 1) followed by the complementary strand of nucleotides 13020-12876 of SEQ ID NO: 103. | | |

[0431] TABLE 6
BlastX Results for ORFs in 90 kb Fragment

| ORF | Start | Stop | Str | BLASTX (accession numbers, entry title, P-value, E-value) | | | Polypeptide |
|---|---|---|---|---|---|---|---|
| 1 | 1637 | 1 | − | emb\|CAB88932.1\| (AL353863) putative ABC | 732 | 0.0 | Type III ABC |
| | | | | transporter [Strept . . . | 330 | e−114 | transporter similar |
| | | | | pir\|\|S57562 strW protein - Streptomyces | | | to Streptomyces |
| | | | | glaucescens >gi\|212 . . . | | | glaucescens strW |
| | | | | emb\|CAB88932.1\| (AL353863) putative ABC | | | gene (resistance to |
| | | | | transporter [Streptomyces coelicolor A3(2)] | | | streptomycin); has |
| | | | | Length = 593 | | | Walker A, B motifs. |
| | | | | Score = 732 bits (1870), Expect(2) = 0.0 | | | Translationally |
| | | | | Identities = 367/462 (79%), | | | coupled to Orf2. |
| | | | | Positives = 405/462 (87%) | | | |
| 2 | 3502 | 1634 | − | emb\|CAB88931.1\| (AL353863) putative ABC | 854 | 0.0 | ABC transporter similar |
| | | | | transporter transme. | 320 | 4e−86 | to Streptomyces |
| | | | | pir\|\|S57561 strV protein - Streptomyces | | | glaucescens strV gene |
| | | | | glaucescens >gi\|212 | | | (resistance to |
| | | | | emb\|CAB88931.1\| (AL353863) putative ABC | | | streptomycin); has |
| | | | | transporter transmembrane subunit | | | Walker B motif. |
| | | | | [Streptomyces coelicolor A3(2)] | | | Translationally |
| | | | | Length = 623 | | | coupled to Orf1. |
| | | | | Score = 854 bits (2183), Expect = 0.0 | | | |
| | | | | Identities = 456/637 (71%), Positives = | | | |
| | | | | 510/637 (79%), Gaps = 17/637 (2%) | | | |
| 3 | 5144 | 3659 | − | gi\|3913215 1-CARBOXY-3-CHLORO-3,4- | 158 | 1.6e−10 | Oxidoreductase |
| | | | | DIHYDROXYCYCLO HE | 120 | 4.6e−06 | |
| | | | | gi\|3914351 PUTATIVE 4,5,- | | | |
| | | | | DIHYDROXYPHTHALATE DEHYDRO | | | |
| | | | | gi\|3913215\|sp\|Q44258\|CBAC_ALCSB | | | |
| | | | | 1-CARBOXY-3- | | | |
| | | | | CHLORO-3.4-DIHYDROXYCYCLO HEXA-1,5-DIENE | | | |
| | | | | DEHYDROGENASE | | | |
| | | | | Length = 397 | | | |
| | | | | Score = 158 (66.0 bits), Expect = 1.6e−10, | | | |
| | | | | P = 1.6e−10 | | | |
| | | | | Identities = 59/218 (27%), Positives = 180/218 | | | |
| | | | | (82%), Gaps = 24/218 (11%) | | | |
| 4 | 8364 | 5410 | − | gi\|2506961 D-LACTATE DEHYDROGENASE | 251 | 5.1e−21 | Transmembrane, FAD- |
| | | | | [CYTOCHROME], MI . . . | 212 | 1.9e−16 | dependent |
| | | | | gi\|3023651 D-LACTATE DEHYDROGENASE | | | dehydrogenase |
| | | | | [CYTOCHROME] PRE . . . | | | |
| | | | | gi\|2506961\|sp\|P32891\|DLD1_YEAST D- | | | |
| | | | | LACTATE DEHYDROGENASE [CYTOCHROME], | | | |
| | | | | MITOCHONDRIAL PRECURSOR (D- | | | |
| | | | | LACTATE FERRICYTOCHROME C | | | |
| | | | | OXIDOREDUCTASE) (D-LCR) | | | |
| | | | | Length = 587 | | | |
| | | | | Score = 251 (102.2 bits), Expect = 5.1e−21, | | | |
| | | | | P = 5.1e−21 | | | |
| | | | | Identities = 119/502 (23%), Positives = 374/502 | | | |
| | | | | (74%), Gaps = 91/502 (18%) | | | |
| 5 | 8916 | 8416 | − | gi\|10803169\|emb\|CAC13097.1\| (AL445503) | 107 | 3e−23 | Mar family-related |
| | | | | putative marR-family . . . | 56 | 1e−07 | protein |
| | | | | gi\|15896528\|ref\|NP_349877.1\| | | | Transcriptional |
| | | | | Transcriptional regulator, Mar . . . | | | regulator |
| | | | | gi\|10803169\|emb\|CAC13097.1\| (AL445503) | | | Involved in antibiotic |
| | | | | putative marR- | | | susceptibility and |
| | | | | family regulator [Streptomyces coelicolor] | | | resistance |
| | | | | Length = 153 | | | |
| | | | | Score = 107 bits (268), Expect = 3e−23 | | | |
| | | | | Identities = 66/110 (60%), Positives = | | | |
| | | | | 79/110 (71%) | | | |
| 6 | 9030 | 10853 | + | Gb\|AAF67494.1\|AF170880_1 (AF170880) NovA | 1017 | 0.0 | NovA-related protein |
| | | | | [Streptomyces sphe | 946 | 0.0 | (novobiocin biosynthetic |
| | | | | emb\|CAC13096.1\| (AL445503) putative ABC | | | gene cluster) that is |
| | | | | transporter ATP-bin | | | ABC transporter; has |
| | | | | gb\|AAF67494.1\|AF170880_1 (AF170880) NovA | | | Walker A, B motifs |
| | | | | [Streptomyces spheroides] | | | |
| | | | | Length = 635 | | | |
| | | | | Score = 1017 bits (2602), Expect = 0.0 | | | |
| | | | | Identities = 526/609 (86%), Positives = | | | |
| | | | | 559/609 (91%), Gaps = 3/609 (0%) | | | |
| 7 | 10933 | 11544 | + | emb\|CAB91142.1\| (AL355913) putative translation | 64 | 3e−09 | Hypothetical protein |
| | | | | initiation . . . | 62 | 7e−09 | with no significant |
| | | | | pir\|\|JQ0405 hypothetical 119.5 K protein (uvrA | | | match identified |
| | | | | region)- Mic . . . | | | by BlastX |
| | | | | emb\|CAB91142.1\| (AL355913) putative | | | |
| | | | | translation initiation factor IF-2(fragment) | | | |
| | | | | [Streptomyces coelicolor A3(2)] | | | |
| | | | | Length = 835 | | | |
| | | | | Score = 63.6 bits (152), Expect = 3e−09 | | | |
| | | | | Identities = 74/237 (31%), Positives = | | | |
| | | | | 84/237 (35%), Gaps = 6/237 (2%) | | | |
| 8 | 11990 | 12850 | + | gi\|7688708\|gb\|AAF67495.1\|AF170880_2 | 319 | 2e−86 | NovB-related protein |
| | | | | (AF170880) NovB [Strept | 297 | 9e−80 | (novobiocin |
| | | | | gi\|10803167\|emb\|CAC13095.1\| | | | biosynthetic |
| | | | | (AL445503) conserved hypothetic | | | gene cluster) |
| | | | | gi\|7688708\|gb\|AAF67495.1\|AF170880_2 | | | |
| | | | | (AF170880) NovB [Streptomyces spheroides] | | | |
| | | | | Length = 284 | | | |
| | | | | Score = 319 bits (817), Expect = 2e−86 | | | |
| | | | | Identities = 156/247 (63%), Positives = | | | |
| | | | | 188/247 (75%) | | | |
| 9 | 14038 | 12878 | − | gb\|AAF67496.1\|AF170880_3 (AF170880) NovC | 520 | e−146 | Nov-C related |
| | | | | [Streptomyces sphe | 261 | 1e−68 | protein that is |
| | | | | emb\|CAB71851.1\| (AL138667) putative | | | oxidoreductase |
| | | | | monooxygenase. [Strepto | | | |
| | | | | gb\|AAF67496.1\|AF170880_3 (AF170880) NovC | | | |
| | | | | [Streptomyces spheroides] | | | |
| | | | | Length = 352 | | | |
| | | | | Score = 520 bits (1324), Expect = e−146 | | | |
| | | | | Identities = 260/346 (75%), Positives = | | | |
| | | | | 283/346 (81%), Gaps = 1/346 (0%) | | | |
| 10 | 14348 | 14070 | − | pir\|\|I39929 hypothetical protein orfM - | 78 | 2e−14 | Monooxygenase |
| | | | | Bacillus subtilis | 78 | 2e−14 | |
| | | | | pir\|\|D69817 sulfate starvation-induced | | | |
| | | | | protein 6 homolog yg | | | |
| | | | | pir\|\|I39929 hypothetical protein orfM - | | | |
| | | | | Bacillus subtilis (fragment) | | | |
| | | | | gb\|AAA64350.1\| (L16808) Gene disrupted by | | | |
| | | | | Tn917 insertion after base 3033. Translation | | | |
| | | | | product hydrophilic, no homologues in the | | | |
| | | | | databases.; putative [Bacillus subtilis] | | | |
| | | | | Length = 372 | | | |
| | | | | Score = 78.0 bits (189), Expect = 2e−14 | | | |
| | | | | Identities = 37/53 (69%), Positives = | | | |
| | | | | 41/53 (76%) | | | |
| 11 | 15697 | 14522 | − | gi\|1723069 HYPOTHETICAL 69.5 KDA PROTEIN | 86 | 0.04 | Hypothetical protein |
| | | | | RV1364C | 85 | 0.053 | |
| | | | | gi\|8928323 SIGMAB REGULATION PROTEIN | | | |
| | | | | PHOSPHATASE 2C | | | |
| | | | | gi\|1723069\|sp\|Q11034\|YD64_MYCTU | | | |
| | | | | HYPOTHETICAL 69.5 KDA PROTEIN RV1364C | | | |
| | | | | Length = 653 | | | |
| | | | | Score = 86 (37.9 bits), Expect = 0.041 , | | | |
| | | | | P = 0.04 | | | |
| | | | | Identities = 45/153 (29%), Positives = | | | |
| | | | | 132/153 (86%), Gaps = 6/153 (3%) | | | |
| 12a | 17597 | 16938 | − | gi\|728850 GLUCOAMYLASE S1/S2 PRECURSOR | 113 | 1.9e−05 | Hypothetical protein |
| | | | | (GLUCAN 1,4 | 91 | 0.0072 | |
| | | | | gi\|138350 GLYCOPROTEIN X PRECURSOR | | | |
| | | | | gi\|728850\|sp\|P08640\|AMYH_YEAST | | | |
| | | | | GLUCOAMYLASE | | | |
| | | | | S1/S2 PRECURSOR (GLUCAN | | | |
| | | | | 1,4-ALPHA-GLUCOSIDASE) | | | |
| | | | | (1,4-ALPHA-D-GLUCAN GLUCOHYDROLASE) | | | |
| | | | | Length = 1367 | | | |
| | | | | Score = 113 (48.4 bits), Expect = 1.9e−05, | | | |
| | | | | P = 1.9e−05 | | | |
| | | | | Identities = 47/186 (25%), Positives = | | | |
| | | | | 158/186 (84%), Gaps = 12/186 (6%) | | | |
| 12b | 17870 | 18682 | + | gi\|8546911\|emb\|CAB94663.1\| (AL359216) | 34 | 1.3 | Hypothetical Protein |
| | | | | hypothetical protein . . . | 33 | 2.9 | |
| | | | | gi\|8546913\|emb\|CAB94625.1\| (AL359215) | | | |
| | | | | putative membrane pro . . . | | | |
| | | | | gi\|8546911\|emb\|CAB94663.1\| (AL359216) | | | |
| | | | | hypothetical protein | | | |
| | | | | SC1D2.05 (fragment). [Streptomyces coelicolor | | | |
| | | | | A3(2)] | | | |
| | | | | Length = 192 | | | |
| | | | | Score = 34.3 bits (77), Expect = 1.3 | | | |
| | | | | Identities = 28/94 (29%), Positives = 40/94 (41%), | | | |
| | | | | Gaps = 5/94 (5%) | | | |
| 13 | 19898 | 18915 | − | emb\|CAB94641.1\| (AL359215) putative iron | 250 | 2e−65 | Iron (ABC) transporter |
| | | | | transport lipoprot . . . | 168 | 1e−40 | Association with orfs |
| | | | | pir\|\|C83282 hypothetical protein PA2913 | | | 14 and 15 |
| | | | | [imported] - Pseudo . . . | | | |
| | | | | emb\|CAB94641.1\| (AL359215) putative iron | | | |
| | | | | transport lipoprotein. | | | |
| | | | | [Streptomyces coelicolor A3(2)] | | | |
| | | | | Length = 345 | | | |
| | | | | Score = 250 bits (632), Expect = 2e−65 | | | |
| | | | | Identities = 133/322 (41%), Positives = 188/322 | | | |
| | | | | (58%), Gaps = 13/322 (4%) | | | |
| 14 | 20674 | 19907 | − | emb\|CAB94640.1\| (AL359215) putative iron | 279 | 3e−74 | Iron transporter |
| | | | | transport protein, . . . | 250 | 2e−65 | Association with orfs |
| | | | | emb\|CAC14366.1\| (AL445963) Fe uptake system | | | 13 and 15 |
| | | | | permease [Strep . . . | | | |
| | | | | emb\|CAB94640.1\| (AL359215) putative iron | | | |
| | | | | transport protein, ATP-binding component. | | | |
| | | | | [Streptomyces coelicolor A3(2)] | | | |
| | | | | Length = 258 | | | |
| | | | | Score = 279 bits (706), Expect = 3e−74 | | | |
| | | | | Identities = 141/251 (56%), Positives = | | | |
| | | | | 181/251 (71%) | | | |
| 15 | 21782 | 20676 | − | emb\|CAB94639.1\| (AL359215) putative | 371 | e−102 | Iron transporter |
| | | | | FecCD-family membrane t | 277 | 2e−73 | Association with orfs |
| | | | | emb\|CAC14365.1\| (AL445963) Fe uptake | | | 13 and 14 |
| | | | | system integral membra | | | |
| | | | | emb\|CAB94639.1\| (AL359215) putative | | | |
| | | | | FecCD-family membrane transport protein. | | | |
| | | | | [Streptomyces coelicolor A3(2)] | | | |
| | | | | Length = 368 | | | |
| | | | | Score = 371 bits (943), Expect = e−102 | | | |
| | | | | Identities = 192/365 (52%), Positives = | | | |
| | | | | 248/365 (67%) | | | |
| 16 | 23130 | 21877 | − | gi\|138350 GLYCOPROTEIN X PRECURSOR | 94 | 0.0088 | Hypothetical protein |
| | | | | gi\|728850 GLUCOAMYLASE S1/S2 PRECURSOR | 83 | 0.16 | |
| | | | | (GLUCAN 1,4. . . | | | |
| | | | | gi\|138350\|sp\|P28968\|VGLX_HSVEB | | | |
| | | | | GLYCOPROTEIN X PRECURSOR | | | |
| | | | | Length = 797 | | | |
| | | | | Score = 94 (41.0 bits), Expect = 0.0088, | | | |
| | | | | P = 0.0088 | | | |
| | | | | Identities = 51/216 (23%), Positives = | | | |
| | | | | 181/216 (83%), Gaps = 9/216 (4%) | | | |
| 17 | 23987 | 23127 | − | gi\|14591289\|ref\|NP_143367.1\| hypothetical | 46 | 3e−04 | Hypothetical protein |
| | | | | protein [Pyrococc . . . | 42 | 0.006 | |
| | | | | gi\|322598\|pir\|\|S28604 St12p protein - | | | |
| | | | | Arabidopsis thaliana | | | |
| | | | | gi\|14591289\|ref\|NP_143367.1\| hypothetical | | | |
| | | | | protein [Pyrococcus horikoshii] | | | |
| | | | | Length = 248 | | | |
| | | | | Score = 46.2 bits (108), Expect = 3e−04 | | | |
| | | | | Identities = 31/119 (26%), Positives = 62/119 (52%), | | | |
| | | | | Gaps = 2/119 (1%) | | | |
| 18 | 24966 | 23953 | − | gi\|543960 CYSTATHIONINE BETA-SYNTHASE | 162 | 4.3e−11 | Hypothetical protein |
| | | | | (SERINE SULF | 147 | 2.4e−09 | |
| | | | | gi\|2493892 CYSTEINE SYNTHASE | | | |
| | | | | (O-ACETYLSERINE SULFHY . . . | | | |
| | | | | gi\|543960\|sp\|P32232\|CBS_RAT CYSTATHIONINE | | | |
| | | | | BETA-SYNTHASE (SERINE SULFHYDRASE) | | | |
| | | | | (BETA-THIONASE) (HEMOPROTEIN H-450) | | | |
| | | | | Length = 561 | | | |
| | | | | Score = 162 (67.5 bits), Expect = 4.3e−11, | | | |
| | | | | P = 4.3e−11 | | | |
| | | | | Identities = 76/290 (26%), Positives = 243/290 | | | |
| | | | | (83%), Gaps = 17/290 (5%) | | | |
| 19 | 25228 | 26127 | + | gi\|8928195 MEVALONATE KINASE (MK) | 99 | 0.00096 | Hypothetical protein |
| | | | | gi\|8928178 MEVALONATE KINASE (MK) | 90 | 0.011 | |
| | | | | gi\|8928195\|sp\|Q9V187\|KIME_PYRAB | | | |
| | | | | MEVALONATE KINASE (MK) | | | |
| | | | | Length = 335 | | | |
| | | | | Score = 99 (43.0 bits), Expect = 0.00096, | | | |
| | | | | P = 0.00096 | | | |
| | | | | Identities = 25/61 (40%), Positives = | | | |
| | | | | 49/61 (80%) | | | |
| 20 | 26445 | 27212 | + | gi\|731172 SKIN SECRETORY PROTEIN XP2 | 87 | 0.019 | Hypothetical protein |
| | | | | PRECURSOR (AP . . . | 86 | 0.025 | |
| | | | | gi\|127749 MYOSIN IC HEAVY CHAIN | | | |
| | | | | gi\|731172\|sp\|P17437\|XP2_XENLA SKIN | | | |
| | | | | SECRETORY PROTEIN XP2 PRECURSOR | | | |
| | | | | (APEG PROTEIN) | | | |
| | | | | Length = 439 | | | |
| | | | | Score = 87 (38.3 bits), Expect = 0.019, | | | |
| | | | | P = 0.019 | | | |
| | | | | Identities = 20/54 (37%), Positives = | | | |
| | | | | 39/54 (72%) | | | |
| 21 | 28124 | 27381 | − | emb\|CAB56736.1\| (AL121600) ABC transport | 351 | 4e−96 | ABC Transporter (Mn |
| | | | | protein, ATP-bindi . . . | 154 | 1e−36 | transporter) |
| | | | | pir\|\|H75293 probable manganese ABC | | | |
| | | | | transporter, ATP-binding . . . | | | |
| | | | | emb\|CAB56736.1\| (AL121600) ABC transport | | | |
| | | | | protein, ATP-binding subunit | | | |
| | | | | [Streptomyces coelicolor A3(2)] | | | |
| | | | | Length = 252 | | | |
| | | | | Score = 351 bits (892), Expect = 4e−96 | | | |
| | | | | Identities = 181/247 (73%), Positives = | | | |
| | | | | 193/247 (77%) | | | |
| 22 | 28139 | 29098 | + | emb\|CAB56735.1\| (AL121600) ABC transporter | 462 | e−129 | ABC transporter (integral |
| | | | | protein, integra . . . | 208 | 1e−52 | membrane protein) |
| | | | | pir\|\|G75293 probable manganese ABC | | | Role in Mn or Fe |
| | | | | transporter, permease pr . . . | | | transport |
| | | | | emb\|CAB56735.1\| (AL121600) ABC transporter | | | |
| | | | | protein, integral membrane subunit | | | |
| | | | | [Streptomyces coelicolor A3(2)] | | | |
| | | | | Length = 283 | | | |
| | | | | Score = 462 bits (1177), Expect = e−129 | | | |
| | | | | Identities = 241/272 (88%), Positives = | | | |
| | | | | 252/272 (92%) | | | |
| 23 | 29095 | 30285 | + | gi\|6002369\|emb\|CAB56734.1\| (AL121600) | 484 | e−136 | Hypothetical protein |
| | | | | hypothetical protein . . . | 61 | 2e−08 | |
| | | | | gi\|13592175\|gb\|AAK31375.1\|AC084329_1 | | | |
| | | | | (AC084329) ppg3 [Leish . . . | | | |
| | | | | gi\|6002369\|emb\|CAB56734.1\| (AL121600) | | | |
| | | | | hypothetical protein SCF76.14c | | | |
| | | | | [Streptomyces coelicolor A3(2)] | | | |
| | | | | Length = 415 | | | |
| | | | | Score = 484 bits (1247), Expect = e−136 | | | |
| | | | | Identities = 245/395 (62%), Positives = | | | |
| | | | | 287/395 (72%), Gaps = 1/395 (0%) | | | |
| 24 | 30282 | 31244 | + | gi\|6002368\|emb\|CAB56733.1\| (AL121600) | 439 | e−122 | ABC transporter protein |
| | | | | putative solute−bindi . . . | 123 | 2e−27 | Translationally |
| | | | | gi\|15807666\|ref\|NP_296243.1\| adhesin | | | coupled to orf23 |
| | | | | B [Deinococcus radiodu . . . | | | |
| | | | | gi\|6002368\|emb\|CAB56733.1\| (AL121600) | | | |
| | | | | putative solute−binding lipoprotein | | | |
| | | | | [Streptomyces coelicolor A3(2)] | | | |
| | | | | Length = 329 | | | |
| | | | | Score = 439 bits (1128), Expect = e−122 | | | |
| | | | | Identities = 222/315 (70%), Positives = | | | |
| | | | | 253/315 (79%) | | | |
| 25 | 31332 | 32537 | + | emb\|CAB56732.1\| (AL121600) putative secreted | 620 | e−176 | Hypothetical Protein |
| | | | | protein [Strep . . . | 130 | 3e−29 | |
| | | | | gb\|AAA59875.1\| (M74027) mucin [Homo sapiens] | | | |
| | | | | emb\|CAB56732.1\| (AL121600) putative secreted | | | |
| | | | | protein [Streptomyces coelicolor A3(2)] | | | |
| | | | | Length = 402 | | | |
| | | | | Score = 620 bits (1581), Expect = e−176 | | | |
| | | | | Identities = 299/402 (74%), Positives = | | | |
| | | | | 341/402 (84%), Gaps = 1/402 (0%) | | | |
| 26a | 32816 | 33427 | − | gi\|8039818 HYPOTHETICAL 23.1 KDA PROTEIN | 159 | 5.3e−11 | Hypothetical protein |
| | | | | MLCL581.27 | 143 | 4e−09 | |
| | | | | gi\|2829591 HYPOTHETICAL 23.0 KDA PROTEIN | | | |
| | | | | RV2637 | | | |
| | | | | gi\|8039818\|sp\|Q49642\|YQ37_MYCLE | | | |
| | | | | HYPOTHETICAL 23.1 | | | |
| | | | | KDA PROTEIN MLCL581.27 | | | |
| | | | | Length = 214 | | | |
| | | | | Score = 159 (66.3 bits), Expect = 5.3e−11, | | | |
| | | | | P = 5.3e−11 | | | |
| | | | | Identities = 57/197 (28%), Positives = | | | |
| | | | | 166/197 (84%), Gaps = 14/197 (7%) | | | |
| 26b | 32686 | 32868 | + | gi\|15805506\|ref\|NP_294202.1\| penicillin- | 33 | 0.72 | Hypothetical Protein |
| | | | | binding protein 1 [ . . . | 32 | 0.95 | |
| | | | | gi\|7248459\|gb\|AAF43497.1\|AF134579_1 | | | |
| | | | | (AF134579) arabinogalac . . . | | | |
| | | | | gi\|15805506\|ref\|NP_294202.1\| | | | |
| | | | | penicillin-binding protein | | | |
| | | | | 1 [Deinococcus radiodurans] | | | |
| | | | | gi\|7473266\|pir\|\|B75514 penicillin-binding | | | |
| | | | | protein 1 - Deinococcus radiodurans (strain R1) | | | |
| | | | | gi\|6458167\|gb\|AAF10059.1\|AE001907_5 | | | |
| | | | | (AE001907) penicillin-binding protein 1 | | | |
| | | | | [Deinococcus radiodurans] | | | |
| | | | | Length = 873 | | | |
| | | | | Score = 32.7 bits (73), Expect = 0.72 | | | |
| | | | | Identities = 24/55 (43%), Positives = 28/55 (50%) | | | |
| 27 | 34195 | 35154 | + | pir\|\|T36741 probable ABC-type transport | 291 | 6e−78 | Type I ABC transporter |
| | | | | system ATP-binding . . . | 290 | 2e−77 | similar to daunorubicin |
| | | | | gb\|AAD44229.1\|AF143772_35 (AF143772) DrrA | | | resistance gene, DrrA, in |
| | | | | [Mycobacterium av . . . | | | Streptomyces antibioticus; |
| | | | | pir\|\|T36741 probable ABC-type transport | | | has Walker A, B motifs. |
| | | | | system ATP-binding protein - | | | |
| | | | | Streptomyces coelicolor | | | |
| | | | | emb\|CAB50934.1\| (AL096849) putative | | | |
| | | | | ABC-transporter ATP-binding protein | | | |
| | | | | [Streptomyces coelicolor A3(2)] | | | |
| | | | | Length = 332 | | | |
| | | | | Score = 291 bits (738), Expect = 6e−78 | | | |
| | | | | Identities = 168/303 (55%), Positives = | | | |
| | | | | 204/303 (66%), Gaps = 2/303 (0%) | | | |
| 28 | 35148 | 36017 | + | pir\|\|S32909 hypothetical protein 5 - | 120 | 2e−26 | ABC transporter (integral |
| | | | | Streptomyces antibioti . . . | 115 | 6e−25 | membrane protein) similar |
| | | | | pir\|\|T50567 probable ABC-type transport | | | to daunorubicin resistance |
| | | | | protein, transmembr . . . | | | gene, DrrB, in |
| | | | | pir\|\|S32909 hypothetical protein 5 - | | | Streptomyces antibioticus; |
| | | | | Streptomyces antibioticus | | | has Walker A, B motifs. |
| | | | | gb\|AAA26794.1\| (L06249) membrane protein | | | |
| | | | | [Streptomyces antibioticus] | | | |
| | | | | Length = 273 | | | |
| | | | | Score = 120 bits (299), Expect = 2e−26 | | | |
| | | | | Identities = 72/226 (31%), Positives = | | | |
| | | | | 113/226 (49%) | | | |
| 35 | 85270 | 85497 | + | pir\|\|T36310 probable small conserved | 111 | 9e−25 | Hypothetical Protein |
| | | | | hypothetical protein S . . . | 101 | 1e−21 | |
| | | | | gb\|AAG29779.1\|AF235050_2 (AF235050) CumB | | | |
| | | | | [Streptomyces rish . . . | | | |
| | | | | pir\|\|T36310 probable small conserved | | | |
| | | | | hypothetical protein SCE8.11c- | | | |
| | | | | Streptomyces coelicolor | | | |
| | | | | gb\|AAD18046.1\| (AF124138) Cda-orfX | | | |
| | | | | [Streptomyces coelicolor A3(2)] | | | |
| | | | | emb\|CAB38589.1\| (AL035654) putative small | | | |
| | | | | conserved hypothetical protein | | | |
| | | | | [Streptomyces coelicolor A3(2)] | | | |
| | | | | Length = 71 | | | |
| | | | | Score = 111 bits (276), Expect = 9e−25 | | | |
| | | | | Identities = 46/67 (68%), Positives = | | | |
| | | | | 56/67 (82%) | | | |
| 37 | 86434 | 87420 | + | pir\|\|T36307 hypothetical protein SCE8.08c - | 175 | 7e−43 | Hypothetical Protein |
| | | | | Streptomyces co . . . | 94 | 3e−18 | Translationally |
| | | | | gb\|AAA59875.1\| (M74027) mucin [Homo sapiens] | | | coupled to orf 38 |
| | | | | pir\|\|T36307 hypothetical protein SCE8.08c - | | | |
| | | | | Streptomyces coelicolor | | | |
| | | | | emb\|CAB38586.1\| (AL035654) hypothetical protein | | | |
| | | | | [Streptomyces coelicolor A3(2)] | | | |
| | | | | Length = 338 | | | |
| | | | | Score = 175 bits (439), Expect = 7e−43 | | | |
| | | | | Identities = 120/330 (36%), Positives = 164/330 | | | |
| | | | | (49%), Gaps = 13/330 (3%) | | | |
| 38 | 87417 | 88154 | + | pir\|\|E83323 hypothetical protein PA2579 | 102 | 3e−21 | Hypothetical Protein |
| | | | | [imported] - Pseudo . . . | 87 | 2e−16 | Translationally |
| | | | | pir\|\|G75588 probable tryptophan 2,3-dioxygenase - | | | coupled to orf 37 |
| | | | | Deinococc . . . | | | |
| | | | | pir\|\|G75588 probable tryptophan 2,3-dioxygenase - | | | |
| | | | | Deinococcus radiodurans (strain R1) | | | |
| | | | | gb\|AAF12443.1\|AE001863_68 (AE001863) | | | |
| | | | | tryptophan 2,3-dioxygenase, putative | | | |
| | | | | [Deinococcus radiodurans] | | | |
| | | | | Length = 287 | | | |
| | | | | Score = 87.4 bits (213), Expect = 2e−16 | | | |
| | | | | Identities = 73/259 (28%), Positives = | | | |
| | | | | 107/259 (41%), Gaps = 37/259 (14%) | | | |
| 41 | 89910 | 90563 | + | gi\|7480757\|pir\|\|T36281 probable | 114 | 2e−24 | |
| | | | | hydrolase - Streptomyces co . . . | | | |
| | | | | gi\|7480757\|pir\|\|T36281 | | | |
| | | | | probable hydrolase - Streptomyces coelicolor | | | |
| | | | | gi\|5123678\|emb\|CAB45367.1\| (AL079345) | | | |
| | | | | putative hydrolase | | | |
| | | | | [Streptomyces coelicolor A3(2)] | | | |
| | | | | Length = 215 Score = 114 bits (285), | | | |
| | | | | Expect = 2e−24 | | | |
| | | | | Identities = 72/170 (42%), Positives = | | | |
| | | | | 96/170 (56%), Gaps = 3/170 (1%) | | | |

Str refers to whether the gene is encoded on the DNA molecule (relative to SEQ ID NO: 1) from left to right (+) or from right to left on the complementary strand.
The BlastX box contains the two top BlastX scores for each ORF (top two lines) and details regarding the database protein entry and the alignment of the ORF to the database entry.

[0432] TABLE 7
BlastX Results for ORFs in SP6 Fragment

| ORF | start | stop | Str | BLASTX (accession numbers, entry title, P-value, E-value) | | | Polypeptide |
|---|---|---|---|---|---|---|---|
| 1 | 965 | 1 | − | pir\|\|T34645 hypothetical protein | 352 | 2e−96 | Hypothetical Protein |
| | | | | SC10H5.07 SC10H5.07 - Stre . . . | 206 | 2e−52 | |
| | | | | pir\|\|T36710 hypothetical protein | | | |
| | | | | SCH69.11c - Streptomyces c . . . | | | |
| | | | | pir\|\|T34645 hypothetical protein | | | |
| | | | | SC10H5.07 SC10H5.07 - Streptomyces coelicolor | | | |
| | | | | emb\|CAA20279.1\| (AL031232) hypothetical | | | |
| | | | | protein SC10H5.07 [Streptomyces coelicolor A3(2)] | | | |
| | | | | Length = 469 | | | |
| | | | | Score = 352 bits (904), Expect = 2e−96 | | | |
| | | | | Identities = 179/305 (58%), Positives = | | | |
| | | | | 216/305 (70%) | | | |
| 2 | 989 | 1948 | − | pir\|\|T35566 probable integral membrane | 206 | 3e−52 | Hypothetical Protein |
| | | | | protein - Streptomyc . . . | 139 | 3e−32 | |
| | | | | gb\|AAA53486.1\| (U03114) unknown | | | |
| | | | | [Streptomyces albus] | | | |
| | | | | pir\|\|T35566 probable integral membrane | | | |
| | | | | protein - Streptomyces coelicolor | | | |
| | | | | emb\|CAA20393.1\| (AL031317) putative | | | |
| | | | | integral membrane | | | |
| | | | | protein [Streptomyces coelicolor] | | | |
| | | | | Length = 315 | | | |
| | | | | Score = 206 bits (523), Expect = 3e−52 | | | |
| | | | | Identities = 114/311 (36%), Positives = 180/311 | | | |
| | | | | (57%), Gaps = 2/311 (0%) | | | |
| 3 | 2099 | 2392 | + | | | | Hypothetical Protein |
| 4 | 3277 | 2405 | − | emb\|CAB88937.1\| (AL353863) acyl-coA | 535 | e−151 | Acyl CoA thioesterase; |
| | | | | thioesterase [Streptomy . . . | 293 | 1e−78 | enzyme involved in |
| | | | | emb\|CAB87210.1\| (AL163641) acyl CoA | | | short chain fatty |
| | | | | thioesterase II [Strept . . . | | | acid biosynthesis |
| | | | | emb\|CAB88937.1\| (AL353863) acyl-coA thioesterase | | | |
| | | | | [Streptomyces coelicolor A3(2)] | | | |
| | | | | Length = 288 | | | |
| | | | | Score = 535 bits (1379), Expect = e−151 | | | |
| | | | | Identities = 258/288 (89%), Positives = | | | |
| | | | | 273/288 (94%) | | | |
| 5 | 5885 | 3312 | − | emb\|CAB88936.1\| (AL353863) putative | 548 | e−155 | DNA helicase |
| | | | | helicase [Streptomyces . . . | 121 | 1e−26 | |
| | | | | gb\|AAG45420.1\|AF309494_1 (AF309494) | | | |
| | | | | vegetative cell wall pr . . . | | | |
| | | | | emb\|CAB88936.1\| (AL353863) putative | | | |
| | | | | helicase [Streptomyces coelicolor A3(2)] | | | |
| | | | | Length = 854 | | | |
| | | | | Score = 548 bits (1413), Expect = e−155 | | | |
| | | | | Identities = 266/323 (82%), Positives = | | | |
| | | | | 291/323 (89%) | | | |
| 6 | 5963 | 6754 | + | emb\|CAB88935.1\| (AL353863) putative | 491 | e−138 | Hypothetical Protein |
| | | | | integral membrane prote . . . | 106 | 2e−22 | |
| | | | | gb\|AAK31375.1\|AC084329_1 (AC084329) ppg3 | | | |
| | | | | [Leishmania major] | | | |
| | | | | emb\|CAB88935.1\| (AL353863) putative integral | | | |
| | | | | membrane protein [Streptomyces coelicolor A3(2)] | | | |
| | | | | Length = 264 | | | |
| | | | | Score = 491 bits (1265), Expect = e−138 | | | |
| | | | | Identities = 235/264 (89%), Positives = 246/264 | | | |
| | | | | (93%), Gaps = 1/264 (0%) | | | |
| 7 | 6850 | 8403 | + | sp\|Q9FCB1\|DNLI_STRCO PROBABLE | 461 | e−141 | DNA Ligase |
| | | | | DNA LIGASE (POLYDEOXYRIBONUCL . . . | 294 | 4e−85 | |
| | | | | ref\|NP_337667.1\| DNA ligase | | | |
| | | | | [Mycobacterium tuberculosis CDC . . . | | | |
| | | | | sp\|Q9FCB1\|DNLI_STRCO PROBABLE DNA | | | |
| | | | | LIGASE (POLYDEOXYRIBONUCLEOTIDE SYNTHASE [ATP]) | | | |
| | | | | emb\|CAC01484.1\| (AL391017) putative DNA | | | |
| | | | | ligase [Streptomyces coelicolor A3(2)] | | | |
| | | | | Length = 512 | | | |
| | | | | Score = 461 bits (1186), Expect(2) = e−141 | | | |
| | | | | Identities = 252/341 (73%), Positives = | | | |
| | | | | 267/341 (77%) | | | |
| 8 | 9860 | 8433 | − | emb\|CAB93757.1\| (AL357613) putative | 299 | 8e−81 | Oxidoreductase |
| | | | | oxidoreductase. [Strept . . . | 130 | 9e−30 | |
| | | | | pir\|\|T34726 probable dehydrogenase - | | | |
| | | | | Streptomyces coelicolo . . . | | | |
| | | | | emb\|CAB93757.1\| (AL357613) putative | | | |
| | | | | oxidoreductase. | | | |
| | | | | [Streptomyces coelicolor A3(2)] | | | |
| | | | | Length = 481 | | | |
| | | | | Score = 299 bits (766), Expect = 8e−81 | | | |
| | | | | Identities = 147/185 (79%), Positives = | | | |
| | | | | 165/185 (88%), Gaps = 1/185 (0%) | | | |
| 9 | 10784 | 9921 | − | emb\|CAB57411.1\| (AL121746) hypothetical | 311 | 3e−84 | Hypothetical Protein |
| | | | | protein SCF73.06c [ . . . | 115 | 6e−25 | |
| | | | | gb\|AAK61383.1\| (AY035849) basic | | | |
| | | | | proline−rich protein [Sus s . . . | | | |
| | | | | emb\|CAB57411.1\| (AL121746) hypothetical protein | | | |
| | | | | SCF73.06c [Streptomyces coelicolor A3(2)] | | | |
| | | | | Length = 333 | | | |
| | | | | Score = 311 bits (798), Expect = 3e−84 | | | |
| | | | | Identities = 166/264 (62%), Positives = | | | |
| | | | | 182/264 (68%) | | | |

Str refers to whether the gene is encoded on the DNA molecule (relative to SEQ ID NO: 1) from left to right (+) or from right to left on the complementary strand.
The BlastX box contains the two top BlastX scores for each ORF (top two lines) and details regarding the database protein entry and the alignment of the ORF to the database entry.

[0433] TABLE 8
BlastX Results for ORFs in GTC Fragment

| ORF | start | stop | frame | DNA | Polypeptide |
|---|---|---|---|---|---|
| 2 | 2941 | 74 | −3 | >gi\|7435848\|pir\|\|S72176 thermolysin | Thermostable |
| | | | | (EC 3.4.24.27) precursor- Bacillus caldolyticus (strain YP-T) | neutral |
| | | | | gi\|995782\|gb\|AAB18652.1\| (U25629) neutral | protein. |
| | | | | proteinase [Bacillus caldolyticus] Length = 546 | |
| | | | | Score = 180 bits (457), Expect = 7e−44 | |
| | | | | Identities = 159/550 (28%), Positives = 251/550 (44%), | |
| | | | | Gaps = 20/550 (3%) | |
| 3 | 3078 | 4103 | 3 | >gi\|8977943\|emb\|CAB95810.1\| (AL359949) | Positive |
| | | | | putative transcriptional regulator [Streptomyces | regulatory |
| | | | | coelicolor A3(2)] Length = 343 | gene for |
| | | | | Score = 89.0 bits (219), Expect = 7e−17 | daptomycin |
| | | | | Identities = 93/335 (27%), Positives = 132/335 (38%), | synthesis |
| | | | | Gaps = 11/335 (3%) | |
| 4 | 5246 | 4131 | −2 | >gi\|6434729\|emb\|CAB61176.1\| (AL132973) | Negative |
| | | | | putative DeoR-family transcriptional regulator | regulatory |
| | | | | [Streptomyces coelicolor A3(2)] Length = 368 | gene for |
| | | | | Score = 179 bits (454), Expect = 4e−44 | daptomycin |
| | | | | Identities = 133/361 (36%), Positives = 171/361 (46%), | synthesis |
| | | | | Gaps = 7/361 (1%) | |
| 5 | 5536 | 6888 | 1 | >gi\|6434730\|emb\|CAB61177.1\| (AL132973) | ABC Transporter |
| | | | | probable solute−binding lipoprotein. [Streptomyces | |
| | | | | coelicolor A3(2)] Length = 443 | |
| | | | | Score = 226 bits (575), Expect = 7e−58 | |
| | | | | Identities = 129/358 (36%), Positives = 184/358 (51%), | |
| | | | | Gaps = 5/358 (1%) | |
| 6 | 7017 | 7814 | 3 | >gi\|6434731\|emb\|CAB61178.1\| (AL132973) | ABC Transporter |
| | | | | putative binding protein dependent transport protein. | |
| | | | | [Streptomyces coelicolor A3(2)] Length = 328 | |
| | | | | Score = 243 bits (619), Expect = 3e−63 | |
| | | | | Identities = 124/239 (51%), Positives = 163/239 (67%), | |
| | | | | Gaps = 5/239 (2%) | |
| 7 | 7943 | 8743 | 2 | >gi\|6434732\|emb\|CAB61179.1\| (AL132973) | ABC Transporter |
| | | | | putative binding protein dependent transport protein. | |
| | | | | [Streptomyces coelicolor A3 (2)] Length = 287 | |
| | | | | Score = 265 bits (677), Expect = 5e−70 | |
| | | | | Identities = 131/252 (51%), Positives = 169/252 (66%) | |
| 8 | 8815 | 9795 | 1 | >gi\|6434733\|emb\|CAB61180.1\| (AL132973) | Dehydrogenase? |
| | | | | putative 2-hydroxyacid-family dehydrogenase. | |
| | | | | [Streptomyces coelicolor A3(2)] Length = 343 | |
| | | | | Score = 190 bits (482), Expect = 3e−47 | |
| | | | | Identities = 120/330 (36%), Positives = 166/330 (49%), | |
| | | | | Gaps = 1/330 (0%) | |
| 9 | 9843 | 11852 | 3 | | Hypothetical |
| | | | | | protein |
| 10 | 11860 | 12738 | 1 | | Hypothetical |
| | | | | | protein |
| 11 | 13799 | 12783 | −2 | | Hypothetical |
| | | | | | protein |
| 12 | 14051 | 14674 | 2 | | Hypothetical |
| | | | | | protein |
| 13 | 14671 | 15846 | 1 | >gi\|7480768\|pir\|\|T35943 probable hydrolytic | Hydrolase |
| | | | | protein - Streptomyces coelicolor | |
| | | | | gi\|4158202\|emb\|CAA22765.1\| (AL035206) | |
| | | | | putative hydrolytic protein [Streptomyces coelicolor | |
| | | | | A3(2)] | |
| | | | | Length = 464 | |
| | | | | Score = 145 bits (366), Expect = 8e−34 | |
| | | | | Identities = 78/198 (39%), Positives = 105/198 (52%), | |
| | | | | Gaps = 12/198 (6%) | |
| 14 | 15954 | 19265 | 3 | >gi\|8894813\|emb\|CAB96009.1\| (AL360055) | SpoVK-like |
| | | | | hypothetical protein [Streptomyces coelicolor A3(2)] | protein |
| | | | | Length = 833 Score = 369 bits (948), Expect = e−101 | |
| | | | | Identities = 271/831 (32%), Positives = 378/831 (44%), | |
| | | | | Gaps = 33/831 (3%) | |
| 15 | 19262 | 20530 | 2 | >gi\|7481390\|pir\|\|T42024 probable serine | Serine |
| | | | | proteinase - Streptomyces coelicolor | protease |
| | | | | gi\|1151075\|gb\|AAA85224.1\| (U33176) serine | |
| | | | | protease [Streptomyces coelicolor] | |
| | | | | Length = 390 | |
| | | | | Score = 68.2 bits (165), Expect = 2e−10 | |
| | | | | Identities = 63/209 (30%), Positives = 88/209 (41%), | |
| | | | | Gaps = 21/209 (10%) | |
| 16 | 23947 | 20585 | −2 | >gi\|3413388\|emb\|AL031231.1\|SC3C3 | FtsK/SpoIIIE |
| | | | | Streptomyces coelicolor cosmid 3C3 Length = 31382 | homologue |
| | | | | Score = 421 bits (914), Expect(6) = 0.0 | |
| | | | | Identities = 180/291 (61%), Positives = 222/291 (75%) | |

### EXAMPLE 15

### Heterologous Production of Daptomycin in Streptomyces lividans in the Absence of Actinorhodin

[0434] Both genetic and medium effects were modified to improve the expression of A21978C lipopeptides in an heterologous host. Various strains containing the dpt gene cluster BAC, along with control strains without the gene cluster, were grown in shake-flask fermentation and clarified broths analyzed for the presence of the A21978C lipopeptide series by HPLC. The dpt cluster on the BAC clone B1203A05 was introduced into S. lividans by protoplast generation using standard techniques (Keiser, T., et al., Practical Streptomycete genetics. John Innes Foundation, Norwich, 2000). Strains examined included both S. lividans TK23 and TK64 strains containing the dpt gene cluster and a genetically altered version of S. lividans TK23 with a partially deleted actinorhodin pathway. Other comparable and suitable act knockout strains are known to those in the art. TK64 differs from TK23 in possessing an rpsL (str-6) mutation conferring resistance to streptomycin, which has also been implicated in enhancement in the production of actinorhodin (Shima et al., J. Bacteriol, 178 (24), 7276-7284 (1996)). The actinorhodin family are colored polyketides produced in copious quantities by S. lividans under many fermentation conditions and which interfere with the detection and purification of other secondary metabolites from the fermentation.

[0435] To eliminate actinorhodin production from S. lividans, a cassette was constructed to delete part of the pathway. An 8kb fragment containing the actinorhodin polyketide synthase pathway (Malpartida and Hopwood, Mol. Gen. Genet., 205, 66-73 (1986)) was cloned into a pUC19; 1.4 kb of DNA was removed from the center of this fragment, thus deleting the 3′ end of actIorfI and almost all of actIorfII. This fragment was then replaced by the resistance marker ermE (Bibb et al., Gene, 38 (1-3),15-26 (1985)). This deletion cassette was then transferred to the temperature sensitive plasmid pGM160 and introduced into S. lividans TK23. These recombinant strains were then fermented for 40 hr before plating on to selective media, from this screening several colonies were isolated with the appropriate phenotype. The genotype of these strains was then confirmed by Southern blots. S. lividans strains of both TK64 and TK23 containing the BAC vector alone were also examined as control strains. See Table 9 for strain notation.

TABLE 9

| CBUK strain | | Presence | rpsL | |
|---|---|---|---|---|
| number | Lineage | of act | status | Transforming DNA |
| 136736 | TK64 | + | str-6 | BAC vector only |
| 136742 | TK64 | + | str-6 | B12:03A05 dpt |
| | | | | gene cluster |
| 137028 | TK23 | + | + | BAC vector only |
| 137027 | TK23 | + | + | B12:03A05 dpt |
| | | | | gene cluster |
| 137026 | TK23 (521) | − | + | BAC vector only |
| 137024 | TK23 (521) | − | + | B12:03A05 dpt |
| | | | | gene cluster |

+ in rpsL column indicates wild type status

[0436] Although a number of different media were initially explored, two different media were examined in more detail for their ability to support production of the A21978C lipopeptides in S. lividans. Both of these media also support good production of the A21978C lipopeptides in S. roseosporus. Medium A was a complex medium consisting of 1% glucose (BDH), 2% soluble starch (Sigma), 0.5% yeast extract (Difco), 0.5% casein (Sigma). 4.6% MOPS (Sigma), adjusted to pH 7 and autoclaved. Medium B was a defined medium consisting of 2% glycerol, 0.25% sucrose, 1.2% proline 1.5% MOPS, 0.056% K₂HPO₄, 0.05% NaCl, together with trace elements and vitamins, adjusted to pH 7 and filter sterilized.

[0437] Fermentations were initiated by inoculation of an enriched oatmeal slope containing 100 mg/L apramycin with approximately 0.25 ml material from a cryovial stored at −135° C. After 7-10 days incubation at 28° C., a mixed mycelial and spore suspension was generated by the addition of 4 ml 0.1% Tween 80 and 2 ml inoculated into 40 ml of seed medium containing 25 mg/L apramycin in a baffled flask to initiate the seed stage. Seed flasks were shaken at 240 rpm and 30° C. for 24-28 hours before a 5% transfer to production flasks containing 50 ml of medium A or B. Replicate flasks were sampled from day 2 until day 6 of the production fermentation period by aseptically removing approximately 1 ml broth, centrifuging for 10 min. at 10,000 rpm and analyzing the supernatant by HPLC. Analysis was performed at ambient temperature using a Waters Alliance 2690 HPLC system and a 996 PDA detector with a 4.6×50 mm Symmetry C8 3.5 μM column and a Phenomenex Security Guard C8 cartridge. The gradient initially holds at 90% water and 10% acetonitrile for 2.5 min., followed by a linear gradient over 6 minutes to 100% acetonitrile. The flow rate was 1.5 ml min⁻¹ and the gradient was buffered with 0.01% trifluoroacetic acid. Up to 50 microliters of the supernatant was injected to monitor for production of the native A21987C lipopeptides.

[0438] Confirmation of expected molecular weights was obtained by LC-MS analysis using a Finnigan SSQ710c system using electrospray ionization in positive ion mode, with a scan range of 200-2000 Daltons and 2 second scans. The LC method was run on a Waters Symmetry C8 column (2.1×50 mm 3.5 μm particle size). The method held at the initial conditions of 90% water, 10% acetonitrile and 0.01% formic acid for 0.5 minutes, followed by a linear gradient to 100% acetonitrile and 0.01% formic acid over 6 min. The method then held for 3.5 min. before re-equilibration. The method was run at ambient temperature.

[0439] The heterologous expression of the A21978C lipopeptide series in S. lividans TK64 (136742) in medium A was analyzed by HPLC. Production of three of the A21978C lipopeptides with characteristic UV/visible spectra was evident, with retention times of 5.61, 5.77 and 5.89 minutes (λmax 223.8, 261.5 and 364.5 nm) under the analytical conditions stated above. On LC-MS analysis, these three A21978C lipopeptides yielded molecular ions (M−H)⁺ at m/z of 1634.7, 1648.7 and 1662.7, which is in agreement with the masses reported for the major A21978C lipopeptide metabolites C₁, C₂ and C₃ respectively produced by Streptomyces roseosporus (Debono et al., J. Antibiotics, XL (6), 761-777 (1987)). A similar product profile was also obtained for heterologous expression of the dpt gene cluster in S. lividans TK23 (137027) under the same conditions. Similarly high production levels of actinorhodin were observed in this strain despite the absence of the rpsL mutation that is reported to enhance actinorhodin production. A21978C lipopeptides were not detected in fermentations of the TK64 control strain (136736) or the TK23 control strain (137028) with the BAC vector only integrated.

[0440] The amount of A21978C lipopeptides produced in crude broth by these strains could not be accurately quantitated due to co-chromotography with host peaks, including members of the CDA complex; however, a total maximum yield of the three main lipopeptides was estimated at approximately 20 mg/L. The A21978C lipopeptides were produced early on in the fermentation along with numerous other host metabolites.

[0441] The profile of production of the A21978C lipopeptides was also observed from fermentations of the S. lividans TK23 (137024) act knockout strain in medium A. Absence of an intact act pathway in this strain allowed application of the defined medium B, in which normally high levels of act are supported. Variations of the defined medium were evaluated and a 2 to 4 g/L level of K₂HPO₄ was found advantageous for both production of the A21978C lipopeptides and suppression of some of the host metabolites. HPLC analysis revealed a much cleaner HPLC profile obtained from crude broths of 137024 grown in a higher phosphate supplemented medium at 50 hrs, as compared to production of the A21978C lipopeptides in medium B without the phosphate supplementation. As the fermentation progressed and phosphate derepression occurred, the level and diversity of host metabolites increased, although never to the level previously observed in medium A. Although, early in the fermentation, the production of many host metabolites was suppressed, the production of the CDA series of lipopeptides was not. CDA can exist in both non-phosphorylated and phosphorylated forms. Under the chromatography conditions used, the non-phosphorylated forms of CDA co-chromatographed in the same region as the A21978C lipopeptides and complicated detection and quantification. Incorporation of phosphate into the fermentation medium biased production, at least initially, to the phosphorylated forms of CDA, which were well resolved from the three A21978C lipopeptides by HPLC. This effect on CDA production was also clearly evident from fermentation of the control strain of the S. lividans TK23 act knockout strain with an integrated BAC plasmid not containing the dpt gene cluster (137026) in high phosphate supplemented medium B.

1. An isolated nucleic acid molecule comprising a nucleic acid sequence encoding a daptomycin non-ribosomal peptide synthetase (NRPS) or subunit thereof from Streptomyces roseosporus, wherein the nucleic acid molecule encodes DptBC and wherein said nucleic acid molecule is not pRHB159.

2. The nucleic acid molecule according to claim 1, wherein the nucleic acid molecule encodes a polypeptide comprising amino acid sequence SEQ ID NO: 11.

3. The nucleic acid molecule according to claim 1, wherein the nucleic acid molecule is dptBC or wherein the nucleic acid molecule comprises nucleic acid sequence SEQ ID NO: 12.

4. The nucleic acid molecule according to claim 1, wherein the nucleic acid molecule comprises a nucleic acid sequence from an S. roseosporus nucleic acid sequence from BAC clone B12:03A05.

5. An isolated nucleic acid molecule that encodes a daptomycin NRPS or subunit thereof, wherein the isolated nucleic acid molecule selectively hybridizes to a reference nucleic acid molecule that encodes a daptomycin NRPS or subunit thereof, wherein the reference nucleic acid molecule comprises a nucleic acid sequence selected from the group consisting of:
a) the nucleic acid sequence of dptBC;
(b) a nucleic acid sequence encoding the amino acid sequence of DptBC;
(c) a nucleic acid sequence encoding the amino acid sequence SEQ ID NO: 11; and
(d) the nucleic acid sequence SEQ ID NO: 12;
wherein said nucleic acid molecule is not pRHB159.

6. The isolated nucleic acid molecule according to claim 5, wherein the nucleic acid molecule hybridizes under conditions selected from the group consisting of low stringency conditions, moderate stringency conditions and high stringency conditions.

7. An isolated nucleic acid molecule that encodes a daptomycin NRPS or subunit thereof, wherein the isolated nucleic acid molecule comprises a nucleic acid sequence that has at least 50% sequence identity to a nucleic acid sequence selected from the group consisting of:
(a) the nucleic acid sequence of dptBC;
(b) a nucleic acid sequence encoding the amino acid sequence of DptBC;
(c) a nucleic acid sequence encoding the amino acid sequence SEQ ID NO: 11; and
(d) the nucleic acid sequence SEQ ID NO: 12;
wherein said nucleic acid molecule is not pRHB159.

8. The nucleic acid molecule according to claim 7, wherein the homologous molecule exhibits at least 60% sequence identity to the nucleic acid sequence of any one of (a) to (d).

9. The nucleic acid molecule according to claim 8, wherein the sequence identity is at least 70%.

10. The nucleic acid molecule according to claim 9, wherein the sequence identity is at least 80%.

11. The nucleic acid molecule according to claim 10, wherein the sequence identity is at least 90%.

12. The nucleic acid molecule according to claim 11, wherein the sequence identity is at least 95%.

13. An isolated nucleic acid molecule that encodes a daptomycin NRPS or subunit thereof, wherein the isolated nucleic acid molecule is an allelic variant of a nucleic acid molecule that comprises a nucleic acid sequence selected from the group consisting of:
(a) the nucleic acid sequence of dptBC;
(b) a nucleic acid sequence encoding the amino acid sequence of DptBC;
(c) a nucleic acid sequence encoding the amino acid sequence SEQ ID NO: 11; and
(d) the nucleic acid sequence SEQ ID NO: 12.

14. An isolated nucleic acid molecule comprising a part of a nucleic acid sequence, wherein said part is at least 14 nucleotides, selected from the group consisting of:
(a) a nucleic acid sequence encoding the amino acid sequence of a polypeptide comprising amino acids 5003 to 5007 Of SEQ ID NO: 11; and
(b) a nucleic acid sequence comprising nucleotides 68350 to 68364 of SEQ ID NO: 12;
wherein said nucleic acid molecule is not pRHB159.

15. The isolated nucleic acid molecule according to claim 14, wherein said nucleic acid molecule encodes at least one domain from a daptomycin NRPS.

16. The isolated nucleic acid molecule according to claim 14, wherein said nucleic acid molecule encodes at least one module from a daptomycin NRPS.

17. The nucleic acid molecule according to claim 14, wherein the part comprises at least 17 nucleotides of the nucleic acid sequence.

18. The nucleic acid molecule according to claim 17, wherein the part comprises at least 20 nucleotides of the nucleic acid sequence.

19. The nucleic acid molecule according to claim 18, wherein the part comprises at least 25 nucleotides of the nucleic acid sequence.

20. The nucleic acid molecule according to claim 19, wherein the part comprises at least 50 nucleotides of the nucleic acid sequence.

21. The nucleic acid molecule according to any one of claims 14-20 that is an oligonucleotide from 14 to 60 nucleotides in length.

22. A vector comprising the nucleic acid molecule according to any one of claims 1-21.

23. The vector according to claim 22, wherein the vector comprises expression control sequences controlling the transcription of the nucleic acid molecule.

24. The vector according to claim 23 wherein the expression control sequences control the expression of the nucleic acid molecule in a prokaryotic cell.

25. A host cell comprising the nucleic acid molecule according to any one of claims 1-21.

26. A host cell comprising the vector according to any one of claims 22-24.

27. A method for producing DptBC, or a domain, module or part thereof, comprising the step of culturing the host cell according to claims 25 or 26 under conditions in which the polypeptide is produced, optionally comprising the step of isolating the polypeptide.

28. An isolated polypeptide comprising an amino acid sequence selected from the group consisting of
(a) the amino acid sequence encoded by the nucleic acid sequence of dptBC;
(b) the amino acid sequence of DptBC;
(c) the amino acid sequence of SEQ ID NO: 11; and
(d) the amino acid sequence encoded by the nucleic acid sequence SEQ ID NO: 12.

29. An isolated polypeptide that is encoded by the nucleic acid molecule according to any one of claims 1-13.

30. An isolated polypeptide that is encoded by the nucleic acid molecule according to any one of claims 14-21.

31. An antibody that selectively binds to the polypeptide according to any one of claims 28-30.

32. The antibody according to claim 31 that is an intact immunoglobulin; an antigen-binding portion thereof that is Fab, Fab′, F(ab′)₂, Fv, dAb or a CDR fragment; a single-chain antibody; a chimeric antibody; a diabody; or a polypeptide comprising at least a portion of the immunoglobulin sufficient to confer specific antigen binding to the polypeptide.

33. The antibody according to claim 32, wherein the antibody is a neutralizing antibody.

34. The antibody according to claim 32, wherein the antibody is an activating antibody.

35. The antibody according to claim 32, wherein the antibody is a monoclonal antibody or a polyclonal antibody.

36. A method for preparing an antibody that selectively binds to the polypeptide according to any one of claims 28-30, comprising the steps of
(a) immunizing a non-human animal with the polypeptide; and
(b) isolating the antibody

37. A method for determining if a sample contains a nucleic acid molecule encoding a daptomycin NRPS or a daptomycin NRPS subunit, comprising the steps of
(a) providing a nucleic acid molecule according to any one of claims 1-21;
(b) contacting the nucleic acid molecule with the sample under selective hybridization conditions; and
(c) determining if the nucleic acid molecule selectively hybridized to a nucleic acid molecule in the sample.

38. A method to produce daptomycin comprising the steps of
(a) introducing a nucleic acid molecule comprising SEQ ID NO: 1 in a host cell; and
(b) culturing the host cell under conditions in which daptomycin is produced.

39. The method according to claim 38, wherein the nucleic acid molecule is derived from Streptomyces.

40. The method according to claim 38 wherein the nucleic acid molecule is derived from S. roseosporus.

41. The method according to claim 40, wherein the nucleic acid molecule comprises the entire daptomycin biosynthetic gene cluster.

42. The method according to claim 38, wherein the nucleic acid molecule encodes a peptide comprising DptA, DptBC or DptD.

43. The method according to claim 42, wherein the nucleic acid molecule encodes a polypeptide having an amino acid sequence selected from the group consisting of SEQ ID NO: 9, SEQ ID NO: 11 and SEQ ID NO: 7.

44. The method according to claim 38 wherein the nucleic acid molecule conprises a nucleic acid sequence selected from the group consisting of dptA, dptBC and dptD, or wherein the nucleic acid molecule comprises a nucleic acid sequence selected from the group consisting of SEQ ID NO: 10, SEQ ID NO: 12 and SEQ ID NO: 3.

45. The method according to claim 38, wherein the nucleic acid molecule comprises a nucleic acid sequence from an S. roseosporus nucleic acid sequence from BAC clone B12:03A05.

46. The method according to claim 38, wherein the nucleic acid molecule selectively hybridizes to a reference nucleic acid molecule that encodes a daptomycin gene cluster or a portion thereof, wherein the reference nucleic acid molecule comprises a nucleic acid sequence selected from the group consisting of:
(a) a nucleic acid sequence selected from the group consisting of dptA, dptBC and dptD;
(b) a nucleic acid sequence encoding the amino acid sequence of a polypeptide selected from the group consisting of DptA, DptBC and DptD;
(c) a nucleic acid sequence encoding the amino acid sequence of a polypeptide selected from the group consisting of SEQ ID NO: 9, SEQ ID NO: 11 and SEQ ID NO: 7;
(d) a nucleic acid sequence selected from the group consisting of SEQ ID NO: 10, SEQ ID NO: 12 and SEQ ID NO: 3;
(e) a nucleic acid sequence from an S. roseosporus nucleic acid sequence from BAC clone B12:03A05.

47. The method according to claim 38, further comprising the step of isolating the daptomycin.

48. A method to increase the production of daptomycin by a cell comprising the steps of
(a) providing a host cell that expresses daptomycin;
(b) introducing a nucleic acid molecule into a neutral site of a chromosome of said host cell, wherein the introduction of the nucleic acid molecule results in increased production of daptomycin by a cell compared to the cell without the nucleic acid molecule; and
(c) culturing the host cell under conditions in which daptomycin is produced;
wherein the nucleic acid molecule comprises a nucleic acid sequence selected from the group consistng of
(i) the nucleic acid sequence of dptBC;
(ii) a nucleic acid sequence encoding the amino acid sequence of DptBC;
(iii) a nucleic acid sequence encoding the amino acid sequence SEQ ID NO: 11; and
(iv) the nucleic acid sequence SEQ ID NO: 12.

49. The method according to claim 48, wherein the host cell is S. roseosporus or S. lividans comprising the daptomycin biosynthetic gene cluster.

50. A nucleic acid molecule comprising a nucleic acid sequence selected from the group consisting of SEQ ID NOS: 24, 54, 74, 94, 98 and 100, or encoding a polypeptide having an amino acid sequence selected from the group consisting of SEQ ID NOS: 93, 97 and 99;
wherein said nucleic acid molecule is not pRHB160, pRHB166, pRHB613, pRHB614, or pRHB680.

51. A polypeptide comprising an amino acid sequence selected from the group consisting of SEQ ID NOS: 93, 97, and 99; or encoded by a nucleic acid molecule selected from the group consisting of SEQ ID NOS: 24, 54, 74, 94 98 and 100.

52. A nucleic acid molecule comprising a nucleic acid sequence selected from the group consisting of SEQ ID NOS: 105, 107, 109, 111, 113, 115, 117, 119, 121, 123, 125, 127, 129, 131, 133 and 135; or encoding a polypeptide having an amino acid sequence selected from the group consisting of 104, 108, 110, 112, 114, 116, 118, 120, 122, 124, 126, 128, 130, 132, 134 and 136;
wherein said nucleic acid molecule is not pRHB174.

53. A polypeptide comprising an amino acid sequence selected from the group consisting of SEQ ID NOS: 104, 108, 110, 112, 114, 116, 118, 120, 122, 124, 126, 128, 130, 132, 134 and 136; or encoded by a nucleic acid molecule selected from the group consisting of SEQ ID NOS: 102, 105, 107, 109, 111, 113, 115, 117, 119, 121, 123, 125, 127, 129, 131, 133 and 135.

54. An antibody that binds to the polypeptide according to either of claims 51 or 53.

55. A method for producing a lipopeptide or peptide core thereof, comprising the steps of
(a) providing a cell comprising an NRPS gene cluster other than the daptomycin biosynthetic gene cluster in a cell;
(b) introducing into the cell at least one gene that encodes all or a part of the NRPS from the daptomycin biosynthetic gene cluster; and
(c) culturing the cell under conditions in which the lipopeptide or peptide core thereof is produced.

56. A method for producing a lipopeptide or peptide core thereof, comprising the steps of
(a) providing a cell comprising a daptomycin biosynthetic gene cluster in a cell;
(b) introducing into the cell at least one other gene that encodes all or a part of an NRPS from an NRPS gene cluster other than the daptomycin biosynthetic gene cluster; and
(c) culturing the cell under conditions in which the lipopeptide or peptide core thereof is produced.

57. The method according to either of claims 55 or 56, wherein said daptomycin biosynthetic gene cluster comprises a naturally-occurring nucleotide sequence of the daptomycin biosynthetic gene cluster.

58. The method according to either of claims 55 or 56, wherein said daptomycin biosynthetic gene cluster comprises a modified nucleotide sequence compared to the naturally-occurring nucleotide sequence of the daptomycin biosynthetic gene cluster.

59. The method according to claim 58, wherein said modified nucleotide sequence comprises a modification or replacement of one or more modules of the daptomycin biosynthetic gene cluster that alters one or more amino acids incorporated by the NRPS encoded by the daptomycin biosynthetic gene cluster compared to the amino acids encoded by the NRPS of the naturally-occurring daptomycin biosynthetic gene cluster.

60. The method according to either of claims 55 or 56, wherein said NRPS gene cluster other than the daptomycin biosynthetic gene cluster comprises a naturally-occurring nucleotide sequence of the NRPS gene cluster.

61. The method according to either of claims 55 or 56, wherein said NRPS gene cluster other than the daptomycin biosynthetic gene cluster comprises a modified nucleotide sequence compared to the naturally-occurring nucleotide sequence of the NRPS gene cluster.

62. The method according to claim 61, wherein said modified nucleotide sequence comprises a modification or replacement of one or more modules of the NRPS gene cluster that alters one or more amino acids incorporated by the NRPS gene cluster compared to the amino acids encoded by the NRPS of the naturally-occurring NRPS gene cluster.

63. The method according to either of claims 55 or 56, wherein said daptomycin biosynthetic gene cluster comprises a naturally-occurring nucleotide sequence of the daptomycin biosynthetic gene cluster and said NRPS gene cluster other than the daptomycin biosynthetic gene cluster comprise a naturally-occurring nucleotide sequence of the NRPS gene cluster.

64. The method according to either of claims 55 or 56, wherein said daptomycin biosynthetic gene cluster comprises a modified nucleotide sequence compared to the naturally-occurring nucleotide sequence of the daptomycin biosynthetic gene cluster and said NRPS gene cluster other than the daptomycin biosynthetic gene cluster comprises a modified nucleotide sequence compared to the naturally-occurring nucleotide sequence of the NRPS gene cluster.

65. The method according to claim 64, wherein said modified nucleotide sequence of said daptomycin biosynthetic gene cluster and of said NRPS gene cluster other than the daptomycin biosynthetic gene cluster comprises a modification or replacement of one or more modules of the daptomycin biosynthetic gene cluster or the NRPS gene cluster that alters one or more amino acids incorporated by the NRPS gene cluster compared to the amino acids encoded by the NRPS of the naturally-occurring gene cluster.

66. The method according to either of claims 55 or 56, further comprising the step of introducing into the cell at least one more gene that encodes all or a part of an NRPS from an NRPS gene cluster other than the daptomycin biosynthetic gene cluster.

67. The method according to either of claims 55 or 56, further comprising the step of introducing into the cell at least one more gene that encodes all or a part of an NRPS from the daptomycin biosynthetic gene cluster.

68. The method according to either of claims 55 or 56, further comprising the step of isolating the lipopeptide or peptide core thereof.

69. The cell produced by the method according to either of claims 55 or 56.

70. The lipopeptide or peptide core thereof produced by the method according to either of claims 55 or 56.

71. A method for producing a lipopeptide or peptide core thereof, comprising the steps of
(a) providing a cell comprising a daptomycin biosynthetic gene cluster in a cell;
(b) modifying or exchanging one or more modules of the daptomycin biosynthetic gene cluster to alter at least one amino acid directed for incorporation by the gene cluster;
(c) introducing into the cell at least one other gene that encodes all or a part of an NRPS from the daptomycin biosynthetic gene cluster or another NRPS gene cluster; and
(d) culturing the cell under conditions in which the lipopeptide or peptide core thereof is produced.

72. A method for producing a lipopeptide or peptide core thereof, comprising the steps of
(a) providing a cell comprising an NRPS gene cluster in a cell;
(b) introducing a daptomycin biosynthetic gene cluster in a cell;
(c) modifying or exchanging one or more modules of the daptomycin biosynthetic gene cluster to alter at least one amino acid directed for incorporation by the gene cluster; and
(d) culturing the host cell under conditions in which the lipopeptide or peptide core thereof is produced.

73. A method for producing a lipopeptide or peptide core thereof, comprising the steps of
(a) providing a cell comprising an NRPS gene cluster in a cell;
(b) providing a daptomycin biosynthetic gene cluster in a cell;
(c) modifying or exchanging one or more modules of the daptomycin biosynthetic gene cluster to alter at least one amino acid directed for incorporation by the gene cluster;
(d) introducing the modified daptomycin biosynthetic gene cluster into the cell; and
(e) culturing the host cell under conditions in which the lipopeptide or peptide core thereof is produced.

The application's sequence listing, which the Patent Office published only in electronic form, follows.

SEQUENCE LISTING (170 sequences)

SEQ ID NO: 1 - DNA, 90597 bp, Streptomyces roseosporus
gccaccaccgtacggccctccagcacccgggccagggaacgctccagatgacgggcggcccgcgggtccagcagcgacgtcgcctcgtccagcaccagcgtgtgcggatcggccagcaccagccgggccagcgcgatctgctgcgcctgggccggggtcagcgtgaacccgcccgaaccgacctcggtgtccagccccttctccagcgccttcgcccagccgtccgcgtcgaccgcggccagcgacgcccacagctcggcgtccttcgccccttccctggccaggcgcagattgtcccggagcgaaccgacgaagacatggtgctcctggttgaccagggccacatgctcacggacccgctccgccgtcatccgcgacaactccgccccgccgagcgtcacctcaccggtgcgcggtgcgtagatccccgccagcagccggcccagcgtcgacttgcccgcgccggacgggccgaccagggcgagccgggtgcccggagccacgtcgagcgacaccttgtgcaggacgtcgacaccttcccggtacccgaagcggacctcgtccgcccgtacgtcccggccttccgggccgacctcggcgtcgcccgcgtccggctcgatgtcccggacgccgaccagccgggccagcgacacctgggccacctggagctcgtcgtaccagcgcaggatcagaccgatcgggtcgaccatcatctgggccagcaacgcccccgtcgtcagctgcccgaccgtcagccacccctccagcacgaaccagccgccgagcagcaggaccgcgccgaggatcgtcacgtacgtggcgttgatgacggggaagagcaccgagcggaggaagagtgtgtaccgttcccacgctgtccattgagaaatccgccggtccgacagcgccacccggcggccgccgaggcggtgcgcctccacggtccgccccgcgtccacggtctccgcgagcatcgcggcgacggcggcgtaaccggcggcctccgagcggtacgcggagggggcccggcggaagtaccagcggcagcccacgatcagcaccggcagcgcgatcagcacggccagcgccagcgggggagcggtcaccgtcagcgcgccgagcagcagcccggcccacacgacgccgatcgccagctgcggcacggcctcgcgcatcgcgttcgccagccggtcgatgtccgtggtgatccgggacagcagatcgcccgtcccggcccgctccagcacaccgggcggcagcccgacggaccggacgaggaagtcctcgcgcagatccgcgagcatctcctcgcccagcatcgcgccgcgcagccgcatggagcgggtgaacaggacctggacgaccagcgccaccgcgaagatcgcggccgtacgctccagatgcaggtcggtgaccccggccgagaggtcctcgaccagaccgcccagcagatacggtccggtgatcgaggcgaccaccgccaccgcgttgaccgcgatcaggacggtgaacgccctgcggtgccgacgcagcagactccgtacgtaactccgcacggtcgtcggtgtgcccacgggcagtgtcgtcgccgactccggggccgcggggtcgtacgccgggggtgcgacgccgatcatgccctctcctcgatttcctcgatgctcttcatggcggggacgtcgccgctcttcatgacggagacgtcgtcaccgacgccgttcaccgcgtccgccgcggccgcctcgtcgtcggtctcgcgggtgacgaccgcccggtagcgcggttcgttgcgcagcaggtcgtggtgggttcccacggcgacgaccgtgccctcgtggacgaggaccacccggtcggcggcgtcgagcagcagcggcgacgaggcgaacgccaccgtcgtacgaccctggcgcagcttcgcgatgccggcggcgacccgtgcctcggtgtgcgagtcgaccgcggaggtcggctcgtccagcaccagcgcctccgggtcggtgaccagggaccgggccagcgccagacgctggcgctggccgccggacagggaccggccgcgctcggtgatccgggtccgcatcgggtccccgtcgttgtcgacggacgcctgggccagagcgctcagcacatcggcgcactgggccgcctccagcgccgtgtccggggtgaccaggcccgaggacgggacgtccagcagctcctggagcgtgccggacagcagcaccgggtccttgtcctggaccaggaccgccgctcgtgcggcgtccagcgggatctcgtccagggcgaccccgccgagcagcaccgacggggtcgccgcggcggccttgtcgtcctcctcgccggtctccgcgtgcccgccgagccgttcggccagccggcccgcctcgtccgggtcaccgcagacgacggccgtgaactgcccgcgcggagccatcagcccggtcgccgggtcgtacagatcaccggtgggcgtcacaccctccaccgtggcctcctgcgcactgcggtgcagcgacagcacccgcaccgcacgctgcgcggacggccgggagaaggagtacgccatcgcgatctcctcgaagtgacgcagggggaacagcatcagggtggccgcgctgtagaccgtgacgagctggccgacgtcgatgcggccgtcccgggcgagcgtcgccccgtaccagaccaggcagatcagcaggatccccggcagcagcacctgcaccgccgagatcagcgcccacatcctggcgctgcgcacggccgcgcggcggacctcctgggaggcgcggcggtagcggccgaggaacagctcctcgccgccgataccgcgcagcacccgcagaccggccacggtgtccgaggccagctcggtggccttgcccgccttctcgcgctgctcgtcggcgcggcgggtggcgcgcggcagcaacggcagcacggccagggccagcaccggcatggcgagcgccaccaccagcccgagggacggcagatagaccgccaggccgacgcagatcaccacgagggcggtggccgcggccgcgaaccgggagagcgcctcgacgaaccagccgatcttctccacgtcaccggtcgacacggccacgacctcaccggccgcgacccgtcgggtcagcgcggagcccagctcggcggtcttgcgggcgagtagttgctggacccgcgcggcggcggtgatccagttggtcacggcggtccggtggagcatggtgtcgccgacggcgatcagtacgccgagggccacgatgaggccgcccgccagggcgagccgccctccggagcggtcgatgacggcctggacggcgagccccacggtgaccggcagaccggcgatgccgagctggtgcagcagcccccaggagagggacttcagctgcccgccgagctgattgcgcccgagccagaacaggaagcgagggcccgaacgtacatcggggtcgccgggatccgaatacggaaggtcgcgaatctgcatgacgtcccagggctcgtgaaacggaggtccggacagacctcgaagacggggtgacgtgcaaggctccctgttcgtcccgttccggggcaaccggtttttttcggtcgcccccgccctgcggggtcccgggccgagcaggcccgggaccccacagacgtcactccgcgggcttctccgagtccatgccggaccgggtcttcttccactcgccccgggtgaagtccgggatcggcaggggcacgcccttggccttgatggacagatggctcagcggcacgggggccgtccagaccgccgcgtcgtacacgtcgaagtcgggcaccagaccgagccgcatgcactgcatcaggcggaacaccatgatgtagtccatcccgccgtggccgcccggcggattggcgtgctccttccacagccagtggtcccactcggcgtacttcttgaagtcgtcccactggtggttggtgttcgtgggctccagatagatccgctccgggtagtcctcgaacacgcccttggtcccgccgaggctgttgatccgcgagtacgggtggggcgacgacacgtcgtgctccaggcggatcacccggcccttggcggtctgcacgaggctgatcgtccggtcggccccgatgtacgactccttccagctcgggtcgcccgcaggcatgtgctcctcgcggtaggcggcgaggcccaggggggtggtgccgacactgctgatgctgacgacccggtcgccccggttgacgtccatgtagttggcgaccggaccgaacccgtggttggggtagaggtcaccgcgcagccgggtgtgccacagccgccgccacggaccctcgtagtagtcggggtcgaacatcagctcacgcagatcgtggttgtaggccccggcgccgtgctgcagctcaccgaagagacccgcgtgcgccatccgcagcacccgcatctcgttcttgccgtaacaacagttctccagctgcatgcagtgccgccgggtgcgctcggagagatccacgagctgccacagctcttccaggcgcatcgcgatcgggcactccaccccgacgtgcttgccgttcagcatcgccgtcttcgccatcgggaagtgcagctcccacggcgtcaccacgtagacgaagtcgatgtccccgcgcttgcagaggttctcgtagtcgtgctcgtccttggcatagatcgccggggcgggctgaccggcggccgtcaccttcttggcggccttctccgccttgtcccggaccgtgtcgcacaccgccttgacctggacgcccgggagggcgaggaagaggtcgatcatgctgtcgccgcggttgccgaggccgatgatgccgacccggaccgtggagcgccgctcgaagggcacgcccgccatggtgcggccctgccggggaggggcggcggccacggcttccgcggcggcgacggcgtccggggcgctccgcccggccgccgaagcggtgcctgcgcccagtgcgccgaggccgagtccggccccggccacgcccgccgtggtccacagcaccgaacggcggctgggatcctgccggttcacctcgtcggccgcgccgctgtgcgggggtatgtcctgcggttccggtgcgggccgggcgtcgtcgttcatcgagcctccaggtggggtttgggggttcagacggtgcgcgagcgcgcccggtcccgccgtacggatacgggcgggcgggaccggggctcggtaaggaccctggagggtgaggctgatggtgcgcaagggaagtatttggactcttgtcctcaaaccttggacttttctcacggcacgccgaagccccgactggtgcaaccaatcggggccgtaaaacgctcatctgtgcaggccggcgggggtgcccgcgcccgcagtcaccgactcacgggagagtcggccgggtggcgtgttccagttcgatcagcgccgagcggtacgggtgcccggtggcgcgttccatgccgatctcgcacatccggttcgccgacagataggcgtcgtaggggcggcggtcgacctcggcggcctccttggccgtcgccgagtcggtcaactccttgtggagcatgccccggtcgcccgcgaacgcacagcaccccgcgtcgtccgggaccacgacctcctgcgcgcaggcctcggccagcgcccgcaactgccccacgtcacccagatgttccatcgaacaggtcggatgcaggaccgccgagccggccgtccggaacaccgtcagatgcggcagcagctcctcggccgcccacaccagcgagtccacgacggtcagttcgcggtggagcgcccggttgtcctcggtgaggtagggcaccacctcctcggcgatgccgagcgtgcacgaggaggcgtccacgaccagcggcagcgtcccgcccgccgtccagccccaggcggcctccacgatccggttcgccatgatcctgttgcccgcgtcgtatcccttggaatgccagatcgtcgcgcagcacgtgcccgtgacgtcctcggggatccacaccggctttccggcccgcccggacacggcgaccaccgcctcggccagggagagagcgggccccgcgtcgccgtcgtcgggcccggcgaagatgcggttgacacaggccgggtagtagacggcgctcgcccccacgcgtgcggtgtccggcagccgccgggccgcagcaccggggatctgcggcagccactccggtacgagatcggggcgcacggccttgcgggcgaggcgcgtcacggcctgcagcggtgcgtcccccacccggttcccgacggtgtcggccgccgccacggccagccgcgccgaagcctccaccgcgcggaagttcttcgcggtgagggccgcgatccgctcctcgcgcggggtgtgcctgcggtgccggaagcccttcatcatcgccccggtgtcgatgccgaccgggcaggcgagtttgcaggtggaatccccggcgcaggtgtccacggcgtcatagccgtacgcgtccagaaggccggactccaccggtgagccgtcggtctgccgcatcatctcccggcgcagcacgatccgctggcgcggagtggtggtcagatcctcactggggcaggtcggctcgcagaagccgcactcgatgcacgggtcggcgaccgcctccaccttcggaatggtcttcaggccccgcagatgggcccgcgggtcccggtccagcacgatgcgtggagcgagcaccccggcggggtcgatgacctgcttggtccgccacatcagctcggtggcgcgcggcccccactcgcgctccaggaacggcgcgatattgcgtccggtggcgtgctccgccttgagcgatccgtcgaaccggtccaccaccagcgcgcagaactcctgcatgaacgcgtcgtaccgggccacgtcggccggcttcgccgcgtcgaacgcgagcaggaagtgcagattgccgtgtgccgcgtgccccgccacggcggcgtcgaagccgtggcgcgactggagctccagcagcgccgcgcaggcgtccgccagccgggcgggcggcaccgcgaagtcctccgtgatcagggtggtgcccgagggccgggagccgccgacggcggtcacgaacgccttgcgggccttccagtacccggcgatcgtcccggcgtcccgggtgaacgcgttggtcacggacgccgccggacgcacgaggtccagaccggccacgaccgcgtccgccgcccgctcgaacgccgcccggcccgcctcgtcggccgcccggaactccaccagcagcgcggtcgtctcccggggcagcgccgcccagtccgccggaacgcccggcacgctgacggaggcgcgcagggtgttgccgtccatcagctccacggcgatcgcccccgcctcgttgaaccggggcacggccgccgcggcggcggtgagggaggggaagaacagcaggccgctggagacccgccggtcgagcgggagggtgtcgaagacgacctcggagatgaagccgaacgtgccctcggagccgaccatcagcccgcgcaggatctgcaccggcgtcgccccgtcgaggaaggcgtccaggcgatagccattggtgttcttgatcgtgtacttggcgcggatccgggcggtcagctccgcgtccgcctcgatctccgccttcagctccagcagccccgcgcacagctccggttcggcgtgggccagctcctcgtcggcggcggggtgcgcggtgtcgacgacggtgccgctcggcagcacgaaggtgagcgaggcgagcgtgcggtaggagttgcgggtggtgcccgccgtcatgcccgaggcgttgttggcgacgaccccgccgagggtgcaggcgatggcgctggccggatcggggcccagcagcctgccgtaccgggcgagggcggcgttggcccgcatgacggtggtgcccggcaggatccgggcccgcgccccgtcgtccagcacctccacgccggtccagtgacggcgtacgtcgacgaggatgtcctcgccctgggcctggccgttgaggctggtgcccgcggcccggaagaccacggatcggcccttgccatgggcgtacgacaggatcgcggacacgtcgtcgaggtcctcggggaccagcacgacccgggggaggaagcggtaggggctggcgtcggaggcgtaccgcacgaggtcggagatcttccagagcaccttgtccgcgccgagcagcgcggtcagctcgctccgcagcggctccggggtgccgcccgcgctgccgtcggtgacccggtcgggggcgggttcccgcgccgttccggggcgcagcgcttccgggtcgggctccagcagcggcatgtcggccttcccctcggctcggcgctcagcggtggcacgcggcagcggcgctcagcagtggcgctccggcattccgtcgaccagagcggacagcagctcgccgaacacctcgcgctgatcggcggtcaatggagccaggatctcctctgcggcggcccggcgcgcgctgcgcagggaccgcagcgtggcgcgcccctcgtcggtgatctcgatacggaccacccggcggctgtcgggatccggggcgcggcgcacccggccgctcgcctccagggcgtcgaccagcgtggtcacggcgcgcgggacgacgtcgagccgtcgggccagatccgccatccggggggccgcgtcgtaactcgcgaccgtccgcaacaggcggaactgggccggagtgatgtcgatcggctccagctggcggcgctggatgcggtgcagccgccgggtgagccgcagcagctgttcggcgagcaagccgtcacgggagtcccgggaatcgcgagagtcccgggactcgggggaatcaggggagtcgggggaatccggggcgtccatacgggaacaatatcaggaccttgttcattgtgagcataggtaacaatgagctaggctctcactgtgcgggaccgggactgcccggccccgcctcacgcccgacgaaggagcccatgaaacccgacgaacccacgtggacgcccccgcccgatgcccgccccgccgccgaccggcggcccgccgaggtgcgccgcatcctccgcctcttccgcccctatcgcggccgcctggccgtcgtcggcctgctggtcggcgcatcctccctggtcggggtcgcctccccgttcctgctgcgcgagatcctcgacaccgccatcccgcagggacgcacgggcctgctgaccctgctggcgctcggcatgatcctcaccgccgtgatgaccagcgtcttcggcgtgctccagaccctcatctcgaccaccgtcggccagcgcgtcatgcacgacctgcgcaccgccgtctacacccagctccagcggatgccgctcgccttcttcacccggacccgcacgggcgaggtccagtcccgcatcgccaacgacatcggcggcatgcaggcgacggtcacctccaccgcgacctcgctggtctccaacctcacggccgtcatcgcgaccgtcgtcgccatgctcgccctcgactggcggctcaccgtcgtctcgctgctcctgctgccggtcttcgtcgcgatcagccgccgcgtcggccgggaacgcaagaagatcaccacccagcgccagaaacagatggccgcgatggccgccaccgtcaccgagtccctctcggtcagcggcatcctcctcggccgcacgatgggccgctccgactccctcacccagggcttcgccgaggagtccgagcgcctggtcgacctcgaagtgcgctccaacatggccggccgctggcggatgtccgtgatcggcattgtgatggccgccatgcccgccgtcatctactgggcggccggactcaccttcgcgtccggagccgccgccgtctccatcggcacactcgtcgccttcgtcacgctccagcaggggctgttccgcccggcggtcagcctgctctccaccggtgtgcagatgcagacctccctcgccctcttccagcgcatcttcgaatacctcgacctcacggtggacatcaccgaaccggaacacccggtccggctggagaggatccgcggcgagatcgccttcgaggacgtcgacttcagctacgacgagaagaacggcccgacgctgaccggcatcgacgtgaccgtccccgcgggcgacagcctcgcggtcgtcggctccaccggctccggcaagtccaccctcagctacctggtgccccggctgtacgacgtcaccggcggccgggtcacgctcgacggcatcgacgtccgcgacctggacttcgacaccctcgcccgggccgtcggcgtcgtctcccaggagacgtacctcttccacgcctcggtcgccgacaacctccgcttcgccaagccggaggccaccgacgaggagatcgaggccgcggcccgcgccgcgcagatccacgaccacatcgcctccctgcccgacggctacgacacgatggtcggcgagcgcggctaccgcttctcgggcggcgagaagcagcgcctcgccatcgcccgcaccatcctgcgcgaccctccggtgctgatcctcgacgaggcgaccagcgcgctcgacacccgtacggaacaggccgtgcaggaggcgatcgacgccctgtccgccggacggaccacgctcaccatcgcgcaccggctctccaccgtccgcgacgcggaccagatcgtcgtcctggaggacggccgggtcgccgagcgcggtacgcacgaggaactgctcgaccgcgacggccgctacgccgccctgatccgccgcgactcccacccggtcccggtcccggtcccggctccctgaccacccttgtcgggccggccctcgatcagaccgcccctgacgtcaccgccatggcccgcatacggcatgatcgccgcgcatgagagctctcctcggggtggaactccccggctaccgcaccgtcgacaccgacacctggctgaacgaccacggcgatgtgctgtccttgcacttcttcgacctgccgccggacctgccggccgcgctggacgacggcccggccctgcggcacggtctgacccacttcaccgccagggcgggcggcggcctcatcgagacatcggtgaagcggctgggcgagctgcccgccctgcggcagatactcaaactgccgctgccgaaccagcccagcggccaggcgttcatcggcagcttcaccgtgccgcgcgccggatgcagcaccgtggtgaagatccaggcggcggagcgcggcatgacgggcatgcgggaagccgtggtgatggccaagctcggccccgaccagtacttccggccgcacccctacgcccccgaggtccagggcgggctgccctttcacacggcggatcacgtccagtgggacgcggagttcccggaccatccgctcacccgggtccgccggacgctcgacaccctcgcggcggcggtgacggtggcacccgagttcgccgcgctgccgcccttcaccggaccggctcaggcgaacggctgagccgaccggctgcgtacacacagcacacagcacacagggcacacggcgcacacagcacacacggcggcgccgccgctcccgtgggacggggagcgacggcgccgggcggagcaatggtcagacgagccaacccacgaagtggacgacgccggcaagcaggttggtcaggaagttcatctggtctttctccttgtacgtggtgcatctgtgggactgcgcagtagcggtctgcagcccgttgactgcgctctgcaatcatcacgccccggacgagtgaagagcaacgaatcccctgacgatcacgcgttccagcgaacacccgatctcttgttcgtgtgttccggctacgggtgttctgtccgcgtcgtacggcgttcgtgtcgccggggccgacgccgtggtcgggctaccggccctggctcgcaccccgggttaacgtgcccgcatggtgaacgagtccccggacgcccgaccccgtcgcagactccgcccgacccgccgcggaaagatcgtcctggtcgtcggcgcactgctcgtcgtgacggccgccgtcctgatccccctgtccctgaccggatcggacgagccgccgaagaagcaggagaccccgcagagcacgctgatgatccccgaaggccgccgagtgtcccaggtgtacgaagcggtcgacaaggcgctcgacctgaagcccggcagcacgctgaaggccgcgtcgacggtggacctgaagctgcccgcccaggccgagggcaaccccgaggggtacctcttcccggccacgtatccgatcgacgacacgaccgagcccgcgggcctgctgcgctacatggccgacaccgcccgcaaacacttcgccgcggaccatgtcacggccggggcccagcggaacaacgtctccgtctacgacacggtcaccatcgccagcatcgtccaggccgaggccgacaccccggccgacatgggcaaggtggcccgcgtcgtctacaaccggctgctcaaggacatgccgctccagatggactccaccatcaactacgccctcaagcgctccaccctggacacgtcgaccgccgacacccagctggacagcccgtacaacagctaccggatcaagggcctgccgccgacgcccatcggcaatccgggagaggacgcgctgcgcgccgccgtcaggcccacgcccggcccctggctctacttcgtcacggtcggccccggcgacacccggttcacggacagctacgacgagcagcagaagaacgtcgaggagttcaaccgcggccgtggctccgccacgacgggctgaccgaatcggcagacggggcggggggattcacacccccggcacgggcgcgggcacggagacgaccgccgaggcccctccgtcggcgcccgtctccttcagcagccgcatgaccgaccggaccgccgcgcggccggcgcggttcgcgccgatggtgctggcggaagggccgtacccgacgagatggacgcgcccgtcccgtacggcacgggtgtcctcggcccggatgccaccacccggctcgcgcagcttcagcggggccagatggtccacggcgggccggaacccggtcgcccagaggatcacgtcggtctcgacggtacggccgtcgtcccaggccacaccggtcggcgtgatccggtcgaacatcggcagccggtccagcactccccgctcccgggcccgccgcacggcatcgttcagcggcagcccggtcacgctgaccacgctcttcggcggcagcccgttgcgtacccgctcctccaccatcgccacggccgcccgcccccactcctcggtgaacggaccttcgcggaacaccggttcgctgcgggtcacccagaaggtgtcggccgcgtgctcggcgatctccatcagatgctgcgtaccggaagcgccacccccgaccacgaggacgcgctgcccggcgaactcctcgggccccggatagttcgccgtgtgcaactgccgcccccggaacgtctcctggcccggatagcgcggccagaacggccggtcccaggtgccggtggcgttgatcagagcccgcgcggcgtacgtcccctcggacgtctccaccagcagccgaccgccgcttccctcccgtacggcgctcacctccacgggccggtggacccgcaggccgaagcggtcctcgtacgcggcgaagtacgcgccgatcacctccgacgagggccggtcggggtcggccccggtcagctccatgcccggaagcgcgtgcatcccgtggaccttgccgtacgtcagcgagggccagcggaactgccacgcaccgcccggccggggcgcgtggtccagcacgacgaagtcgttgtccggctccagcccgacgcggcgcagatggtaggcggcggacagtcccgcctgacccgcgccgatgacgaccacgtccagctcgcgcaccccagaaatgttcacgcttctactaactcgtcgggcgcccgggatcatcccgggcgcccgacgagcgtcaccgcacggctcagcgacccccggcgagcagcaggggagccccgcccggcgccgtggcggtccggctctcggcgccactcacacccagcagcggcgacgcgggcacggtcgacagcagcccgcggcgggacagctcgggtgtgacgccctcgccgaaccagtacgcctcctccagatgcggatatccggagagcacgaagtgctccacgcccagcgcgtggtactcctcgatccggtccgcgacctccgcatggctgcccaccagcgcggtcccggccccgccgcgcaccagaccgacccctgtgtgcgcgagtggagatgatcctgcacggcacgccccacatgcgatcgagcgtttctgaggtctgtgccgtggcctctcggacatggccacggcgagggaatcggtgttgcagagtgacgtgtgtcgttgagtcggcggctcgggcgggggtggcgtggtcaacggttcggtgggcgggcggctgaggcttggtgggtgtccgcgccggagctgacgtggcggtgtacttcttgtgggccgtgccagtccaggcacaccacggtggcgtcgtcttcgaggcggccgcctgcggcgtcgcgtacggcggaggtcagcatcagggtggtctcgcgtgggtgcaggctgcgggtctgccgtagcagggcagctacgtcgatcttctctccgtggcgttcgagcatgccgtccgtcagcatgaggagccggtctcccgggtgcaggtccagggtttggacgcggtaggggcggggcgagacgacggccagcccgaaaggctggtcgacctggcaggggatggtttccaccatgcctgcacgcatgcgcatgggccagggatggccggcgttgacgagctcggcctttccggtgtggaggttgatgcgcagcagttgtccggtggcgtggccctgtccgtggctggtcagggcctggtcgccctggcgggcctgttcggcgaggggggctccggcgcggcgggctctgcgcagggcgcccaccaggacggtggccgccagggctgcgccgaggtcatggcccatggggtcggtcaccgacaggtgcagggtgtcgcggtccagtgcgtagtcgaacgtgtcgccgctgaggtcctcggagggctccaggctcccgctcagggtgaactgcgcggcctcgcaggacagggcctgtggaagcagctgatactggatctccgctgccagggtcgggggtctggagcgtttgccccaggtgtagaagtcggtgaagcgcccgttggcgatcacgacgtaggccagcgcgtgagcggcttccccgacagcgagcacaacctcttcctcgtcgctcctgccggccggcaggagcagttcgagcagaccgatcgcgtccccccggttggtcacgggaactattacccgctgttcttgtccggcgggctcgtgatgcggccgctgggtgcggatcacctgctcgtagacgctccccccgaacagagggatccgctccgtttcgttttcactgcccgcggcagtcgtggtggagagccgcgcgagcgctctaccggtcagatccacaatcaggaatgtgaccttcgtagccgcgaaccgcctgcgcagatcttctgcgaccacggccacggcctcaaccggagccgccgtctccgccgccgtcagcagtcgggacaggtcgctcgagccacggctcatggcagcggttcccttctctggatgtttggggcccgttgcgccccgccgcccagtcgcccctcctcgtacctgccttgcgctccacggtggtcgacagcgagcagcccggcacgggcccgcccgctctcggcccattgcgtgacagtcctgcatccacctgttccagtctgaacctcaatcggccctttgtccggatgagggaccgggtcggccggaggcgaggcgccaccgggtgaggaaggcgccgaccgccacctcgatggggtcggggcggacgatgtcaccgaactcggtggcgcttctcccgcaccaccccgagcagagcgttgtccacgggcgatgttcgtcgccgacaccagcaggacacgccgcccctgggcgatgcggtcgccgatggctcgccggaggacggtggtcttccctgtaccaggcggccccacaccaggtggacgccctcgccgaggcatgctcgatacgcgagcctgggcaggatggaagcccggcggatcgatggcgtgggcagagcgaccgccgatcatcgcggtcgccagagcagtggcgagaggatgctcacccagccaggcgataccgtcacgcaaggcctcgatcaggaaggtgggcggctgcttgagcatccacaggtgagggtcgtcgatctgcgaaatctgctacccgcaatgtgagcagggagccgttctgtacagcctcgaagactgcgaaaccctcgatctcgatgccgtcgttgcccgtcccgggcggcctcagggagtccagctgcccaggtccgatgtcggagcccagcagatcgaccacgtaccggcccgggtcaccgctcctggccgcccgcccgacgagctgccagcgtggctgcctgcccacgcctccttcgacagcgatccactctccgagtgccgaggcgattttctcacgccatcccacctaccgtccccccgatcagcctcggtccgatcgcctgcccgctgctgcgctgtgccctccggctgcgatccggttcgctcgaagtgcctgcggcctgttcacggggccggtggatccgctccggatgcgctgtccttgcaggcacgttcgtccaggcagtcggctcccgaagccgtccagggcgcatcactccgcagggagctagagggctgtcccgtaaaaaacctccgtctcaggggcgttgggggtagtcagggtgatctgcgtagggtgacgcgagaccgagcaggtcatcgcatggccaggtcgcgccgtcgtaccgacagtcatcgcggttgtcccacggcagttcggggtcacccgtggcagggctgagcccatgtcgggcgagcacgcgccgcttggcctcggcttcccgcaggacgcgagccgggtcgtgcagcgcgacgtgcagggcgatcgtggaatggaagccggagagttctccctggcagaagtcgaccgtgtgtccgtgaggggcccactccccgcagccgtcaccgtcgcaccggccggccaggttggcctcctcgtccagccgagcgtggaggaacgtcacaaggtcttggctcatggggtcatcctggccgacggctcggccggtggccggcccactgtttgcgaacttgcgggcggtctgtcgcagggcaccgccctgtccgtgttcggcacggacgcgggagcgggaggccccttggaacgcgaatgctccagcttcgaaggcaacggcgagcagcaaggggtccggcaccatccccgcactccgtgcgccacacctgcgcctctcgcgctcttgtgtcacgagaactcccagaccgcaaagcgccacacccacctgcagtcggacgcgcatagtccgccctggatgctgcggaatcgcatcctcagcccgcgtcgcagtatagatagtccgggttgtcccaacggttgttggtggacaccaacaaggacaatgccaaccgtcaggttcggctgagcttcttcggagggtgagccgatctggttgcacgagaggcgggaagtccggccgcaccaaccggacgctcggaccgtgtgtccgaacctgtcacgcaagcctgcacaggcccccgccgtgcaatcgaagggctgctcctggtgcccgtgatgtcggtacgcgatctcgtcgggatgccgtgtcacccgtgcgaaccgccacgccgcgccgaggggcgccggcgcggcgtggggaggatgaggtggtggaagggggtgctgatgacggttcggcatcagggggtgcggtggtggttcgctcttctcgctctcgtcgggtgcgtggtctgtgtcctctgcgtcgtcgcgctcagcggggcggggcactacttcgggctctccttgtgggcgggcatcgcgctcgtggtggtgggggcgctgtttcccctcggggggctgggcttcctgtactgggtggacgacggccggtccgaggacagcttcctcgtgaagttcctgtgcttcgtcgcccactccgccgtcctcgggctggcagccgtctcgtgcaccggggctgaggcgtgggcctttgagcagcgcgggcggtggacggaggcgacggtcgtgggatacagcccgccccgggtggtcccgggtgatccgccgacgaaggtgcgggcgtcctgcgcgctggagaccgccgagggcgaacgcgtccggccccggctgccggagggccgcggctgccgcgacggggtgcggcacgggtcccgcctcgacgtgctgtacgacccccggggtctgctggcgccccgggccaccgagcccatggaccacggcgtcaccgtcccggtcctcgggggcgtggcgaccctgtccggtttcctcggctgtgtcgccctcgcctggcggtgggaaaccctccgggtacgcagcgcgcgccgcacggcagcgcgccgagggcgggaatccgcagccggttagggggtgggggcgttcgccggctctccttgccgccgtgacctggagcgcggcgcggctggagcccacctgccgggccgagtagttgcctgcactgcgcccttctcgccgtgggagatcgtggctgaggcgatgggcggaagacacccggccttccccggttcagaggggaaggccgggtgtcaggcgcaaggacctgcgagaacccggaaggatcctgctgccgggccggtcatcatttcttgaatgcgcgcatgtactttccgaacttctccaggccgtcgatattgcgcgggctgctgatgccctcgttgtagtcgaggacgaagaagttgttcttcttcacggccggcagttccttggtgtgcggcgacttcttcaggaactcgatcttcttctcggcgggctggtcgccgtagtcgaagatcatgatgacctcgggctcggcctgggtgacggcttcccagttcacctgggtccagcgctcctccaggccgtcgaagatgttcttcccgcccgcggtcttgatgatgtcgttgggcggcacctggttgcccgccgtgaacggctggtcggtcccggagtcgtagaggaacacgggcacgggcttgcccttcggagcctgctcggcgacggcggcctcgcgcttcttcaagccggcgacgaccttctccgcctcctcttcgacctggaagatccgtccgaggcgttcgaggtcggtgtagaggcccttgaaaggcgtcaacttctccggatggcccgggtagttgtagcagctctcactgtgcatgaagctctgtacgccgagcttgtcgaggatctccggggtgatgccccgctggtcgctgaagcccgagttccagccggcgacgacgaagtccgacttggcgtccacgacgatctccttgttgaggaggtcgtcgctgagcatcttcaccttggcgtagtccttcgcccagggagactcgctgaccggcgggttggccggcggcatgacgtagccgtgcacgtggtcggccaggcccagactgaacagcttgtcggcgctgccgccctcgtaggcgacggcccgcttcggcaccgtgtactcgacggactcgccgcagcgcttcacggtgctcttcccggagcccttgccctgggattcgacctcggcgccacaccccgtgagcaggagcgcggacgcggcgacggggatggcgagtttggtgaacttcatggtcttcctcaggaatcgagtgagtagagcaactgggggtcgcccgtcagcggatgcgggacgacggaggcgcggaccccgaatacctcgtcgacgagttcgggcgtgaggacgtccttgggcgtgcccgaggtgatcaggcggccttcgctgagtacgccgatccggtcgcacgcggcggccgcgaggttcaggtcgtggagtacgacgaggacggtcaggccggcaccgcgcagcagggacaggagccgcacctgatggcgtacgtcgagatggttcgtcggctcgtcgaggacgaggatcttcggctcctgcacgagggcgcgggcgagcaggacgcgctggcgctcgccgccggagagggtgaggatgccgcgtcgggccaggtgcaggatgtcgagccgacgcatggcgtgctcgcacagatcccgttcgtgaccgttcaacggggtgctgccgcgctggtggggtgtgcggccgagggcgatcacctcctcgacggtgaagtcgaggtcgacggcgccgtcctgggtcatcgccgcgatgagctgggcgctgcggcgcatggtcagcgacgagagctcctggccgtccaccttcacggtgccggagctgggtttcagggcccggtacacgcaccgcagggcggtggacttgccgctgccgttggggccgacgaggccgaccacctgaccgctgccgacgtccagggagaggtcccgtaccaggctcttgccgtcggtcaccaccgagagcccgtcgagttcgaggtccatctcaacggcctccgaacatgtaggacttgcggcgcatcagggtgatgaacaccgggacgccgaccagcgcggtgatgacgccgagcggcagctcgcggggggcgaccagggtccgcgacacgagatcgacccagaccatgaagaccgccccggcgagtggtgcgacggcgagcacccgcgcgtgcgtcgcgcccaccaccatgcgtacgaggtgcggcatgacgaggccgacgaaggcgatggaaccgctgacggcgaccatcacgcccgtcaccagggagacgagcacgagcagggacttgcggtgtcggtcggggctgatgcccaggctggctgcggtctcgtcaccgagagccaggacgtcgagcgggcggccgtgccggtgcaggacgaggacaccgagcagcacggcggcggtgaccaccggcagcgaaccccaggaagcggcgccgaagctgcccatggtccagtacaggaccatgctggtcgcctcggagctgggcgcgaagtagatgatgacactcatcacggcctggaaacccagcgacatggcgacaccggtcagtacgagccgcagcggcgagagcgcccccttggtggacgaggcgccgtacaccaggactgaggccacgagcgcgccgaggaaggcgcccacggacaccgcgtagatcccgaacacggcgagcccgcccatgaccgtcacaccgacggcgcccacggaggcccccgaggagacgcccagaacgaacgggtcggccagcgcgttgcgcaccagggcctggatggcgacaccgaccgcgctgagcccggcccccacgagcgccgcgagcaggacgcgcggggtgcggatctgccagatgatctggtacgtcgtcacctcgtccgccgagatcggcccgccactgagcgcggcccagaggaagcgcgcggtctcggccggggggaccacggcaggcccgagaccgatggcgacgacgacggagacgacgagcgcggcgaacaggctcacgcagatcgccaccaggcccgtccgggagccggtccgaaccggctcttgcgcggtgggcgcgggacgttgcagcgcctcgggtggcgcgggcggtgacatgtggatcggccttccggtttcggagcgttgatgaacggtggatgtgcgtccgtggggtgcccgcgaccttgggcgggcgccccgtcggcttcggctacgccgaaccggggatctcgtcctcggagcgcagcaccaggagcccggccaccacggccacggcgacgagcagcccgaacgcggcggcgatccccgggtaccccgcgagcccgagtcccgctccgccgagggcggcgccggcgaagacgccgaggctctggcccgccgcgttgaggctcagcgcggaaccccgcatcgatccgcagcgcctgaccagcagactgacggcgcaggcggcgacggccgcgtggctagcggcgtgcagcgaagtaaaggccagggcgagcggcagccaggtcgtgaaccagaaaccggtagcggtgaccagggccgccaacagtccgacgagcaagagctgttcggtacccacggtggatttctcggcgttggtgatgcggcccgtgagcaggttgctgacgaagaacgaggcgccgctgagcgtccacaccagcgagaacagggcggggtcgaggtggaaccggtcgtcgtagtagaccgcgaggtaggcgaggtagcccatgaagaccgcggtgcgcaggaaggagatggcgagcagcggcaccgagccgcggacctgggccagggccttgaacgaggcgaagtagcccgtgcgcgggccaccctcgaccaccgggtcctcgcccttcctgccgcgtacgaggaagaccgcggcgagcagcagcgagacgacggtgacggcgagcaggtcgccctcccatccccacagcagggccggcagggcgatcaggggcgcggcgagcatcgccgtcatcgaggtcgtcgacgtgacgagggtggccgcacgggcggcggacttgccgtcgccgaaccggtcggcggcggcagcggtgagcgccgggttgatcaccgcggtgccggcgccgaccagcaggcagaacaccgcggtcaggaggaagtctccgctcgcgccgagggctgaggagacggcgagtacgacgagaccgaccgcgaccgccttcgacttgggtacccggtcgatcaggggggccagggccgtgcccacggcgagcgccgcgaggccccccaggccgcgcaggccgcccaccgcggcgacaccgctcccggtctcctcggcgatcggcaccagatacgtgctgaagacggtgaacggcagcaggccgacggcggaggccaccaggaccggccacagggctcgcgccatcttcaggtcgccgggcatctcgggggacttctccggtgcgacggccgaacgggaggtgccggcgctcacaggtcaccgcctgcgcggtagcggtacatcgtcgtctcgtcggcgctgaactgtgagaacgggaagggctcggcgttcagggcggtgacgcccgagccgaggaacgcgcgggcgacggcgctgcccgtctgggcgtacacgacgagcggcaccttctgctcgcggcagtgttccaggatcaggtcgaaggtgccgttggagagtgtcatccccgtggcgacgacggcgtgggcctctgcgaggacctcggtcatgtcgtccgcgaccggctctccccactgggtggttcgcaggttgaggtcgcacggcaggcagacgccgccccgctcgcggatcgcggcgacgagcgggttgacgacgccgatgagcgcgaccttggcgccctcctcgatgtcgagcagcccggcgatggacgcgtcccgcgccttcgcccgcacctcgggggtccccaccggcagcgggacggcctcctgctccggggcttcccgatgcggctgtatctgtgcgaggtaggcgtcgagcgccgctatgcgcaccggggcggactcgtggcgcagcaacttctccagcgggtgcccggaggcgttctcgcagaagtccggggtgagttcgcctgcctcgaaggagcagccgccgaaggaccggccgacacgcagcaccaggtagtggttgtggtacgtcaccggtccgccggcgagccgtgtcgtgtggtagagccagaacgcgctggtgacggtcatgtccttcgggtcggggccgtagtccccggcgaggacggcatcggtgagctcggcgaccgactgcggcgtgggaaagggcatgtcagagggctttcttctggtcggaggtggagtcatcggtccacgtcatggcggaccaggggtggctgagctcgtcgagcgaggtgatctcgcgcggttcgaggtcctcgatgtcgggcgcctcggtgtgcttggcgtacgcgctgtcgacgtagcggtgacctgtgtccgccgcgatgaagacgtacgtccgggaatcgtccttcgaccgctcccaccgggtggtcaggtaggcggcgcccgcggacaggcctgcgaagatgccgctggagcggagcaggtggacggcgcctgcgagcgcggagtcgaagctgacccagtggatccggtcgtacagatcgtgccggacgttctcgaacgggatggcgctgccgatgccggcgatgatcatgtccgggtccgagacgtgctccgagccgaacgtgacgctgccgaagggctggactccgacgagggagacgtctcggcccgcctcgcgcagatacgaggcgatggcgcctgtcgacgcgccggaacccacgccgcccaccaaggtcaggggcccggcgggcacctcgtcggcgatcgtttcggccacttcgcggtagccgtagtagtggatgctgtcgtggtactgccgcatccagtggtacgaggggttctcctccaggatctcggcgatgcgccgcacccggagctcctggtcgaggcggagattcctggacggccgcacctgctcgagcgtggcaccgagaatctcgagctgcgccttgagcgtgcggtccaccgtggtcgaccccacgatgtggcacttcatgccgtagcggtggcaggcgagggcgagggcctgcgcgtagatgccgctcgaactgtcgacgagggtgtcaccgggtttgacggtgcccgactcaaggaggtgccgcaccgcccccagagccgagtagatcttcatggtctcgaaccgcagacagaccaggtccggccgcagtgctatgagatcgggtttcttgatcgcttcagctatgtgctcgtacatctccgtcttccggtcgagcgggacatgaaccgtctgcctcgatcaggtccggctgggctgggccgcggtgtggccgtgagcccggacgagagcattatggaaatgaaaacgattgtcaaaaccgagtaaggtgtgcgccagtcatcaccacgggagccgcacaggcagctctacgccccgtgacgggcagcaaggcttttggaggaactcatgcatctgccccgggtcggtccgcgatcctgcctgtcgggtcgggcgggcatggacactggagtgggcaccgcctacggaacgttcggggaactgctccagggtgaactgccggaggaggcaggcgatttcctcgtcacgctgcctgtcgcccggtgggcgagggcgtccttccggtgcgacccggccatgggagatgtcatcgtcaggccgtcgcacaaggagaaggcgaggcggctggcctgcctgatcctggaggaggcaccggggatgaccggtggggtgctgacggtcaacagcgtgatcccggagggcaaagggctggccagttcatccgccgacctggtcgccacggcgcgcgcggtggggcgggccctgcggctcgacatgccgccatcgcggatcgaggggctgctgaggctgatcgaaccgaccgatggtgtcctgtacccgggaatagtcgccttccatcatcgagcggtgcgactgcgcgcgatgctgggctcgttgcccgccatgtcggtcgtcggtgtcgacgagggcggggccgtggacacggtcgacttcaaccgcatacccaagccgttcacgccggcggaccggcgtgagtacgccgacctgctgaaccggctgagtggggccgttcgctcacgcgacctcgcggaggtgggcagggtggcgacgcgcagcgcgctcatgaaccagccgcttcggtacaagcgactgctggagcccatgcgggagatctgcagggatgccggtggtctgggcgtggccgtgggccacagtgggacggcgctcggcgtgctcctggacgccgcggatcccgcgtacccgcaccgggccaccgcggtggcccgggcgtgcggggatctggccggggccgtcgcggtctatcggaccctcagtttcccgaacgccgtcagccatggtggtcggaccgtcggctgagggcggttcccggaggcatgccccgacggggcccgatggcgcggcaagcagggattcgcctgacgttgagggtggcccggatcgctgtatggtcaccgcggtgccggtgcgtggaccgtgtcactcccggctcccttgtgaagccgatcgccggtgctccgcggacgctgtgaaggtggacggcctcgaccggttcgtccaagggcccgaggtgccaaggcctctgcgaccggtatcgcggacgccctcgggcacgtggacttcctctcggccgccgccgggccaaccgttccggacaatcgaagggacccaggttcatgctcaccgcacagcagcctgctcccggcgtcgtgcccgcccggatccacgtcacggacaggttggaggccgctcacccgctcgccgctgacggggctgtcgtcctgacaggcgtcgagccctccggtgacggcctggtcctcgccgccgcagccgtcctgggggagcggctgcagcaggtgttccctcaccggctgcgggcgtccgacggctcgaacttcgtccaccttcatgcggacagcttcgacttcgtcgtcaacgtagggggcgtcgagcatcgccgacgtgatccggatgaggactatgtcctcatccagtgcgtccggcagtccgactccggcggcgactccttcgtggctgacgcctatcgcttcgtggaccactgcgcgacggccgatcctgaactgtgggacttcctgacccgaggggacgtcgacctgtacggcgcgtggtccggactgcgtggtatgcccgcaaccccctttgtgggcaggcatgtcgagtacacccgcgccggtcggcgtatcgtccggcgcggcgacggggtgacccctctgcaccgggaccctggcgcggaccacacccggcggatgctcgcccgtctggaggaagccgtccatgcgctggaggagacgctcccgcgattccggctcgacaagggcgaaatcctcgtcctggacaactaccgctgctggcacggccgcgaggctcacacgggagatcgcgcggtacgtatcctcacggtgcgcagcagcgacgcccgctgaggcgctgttggttcgcctcactcgccgtgacacaggggcaggcgtctgcggcggtgctgtttccgcgcgggacggaccgggggagattccccggtcggtaaagggggcgaccggcgatccgctcaccccgcctcgatcattgcgcaggctcttcgagcgcttcgtgcttcacgccggctgccagatccgggccagtgcctccggggtgagtacttcctccggtgatccctgcccgatcagtcgtccgtcggccaggagcaggcaggcgtcggccgagcgggcggcgtccaggtcgtgggtggcctggacgacggtggtgccgtcggcgaccaggtccgtcagcagggccgtgatccgctcccgcgcctcggggtcgagtccggtggtcggctcgtccaggagaagcaggtcggactgttgggcgaggccctgcgcgatcagcacgcgctgacgctggccgcccgacagctcgccgagctggcgggcgccgaggtcggcgacccccagcctctccatggcggagtcgaccgcggtccggtccgtgcgggtcagccgccgccacaggccccgctgtccccagcggcccatctccaccgtctgccgcgccgtgagggggagggtgtcgccgacggcaccgcgctgcgggacgaaagccggcggggagccctctgcgtaccggagttgtccggatgtggcggtgatcactccggccaggacgcccagcagcgtcgacttgccgcttccgttgggtccgaccagggcggtcatggccaacggcggtattgcggcgctgagttggtggagcacggggcggccggggtagccggcgctcagccgctggaaccggacgcgttcattccgcagttcggtggccggcgggaacggagggttgttattgaacatggttgtcattatatggtcctcgtatggagtggttgacggcccctttcgaggtggcctttgtgcagagggccctatgggccgggatcctggtgtcggcgatatgcgccctcgcgggaacgtgggtggtgctgcgcgggatggccttcctcggtgacgcgatgtcgcacgggctgctgcccggcgtcgcggtcgcctccctgctgggaggcaacctgctggtgggggcggtggtgagcgcggccgtgatggcggcgggcgtcacggccctcgggcggactccgcgactgtcccaggacaccggcatcggcctgctgttcgtgggcatgctgtcgctcggcgtcatcatcgtgtcgcggtcgcagtccttcgcggtggacctcaccggcttcctgttcggagacgtcctcgccgtgcgggggagcgatctgctgcttcttggagtagccctgctgctggcgctggccgtctcggtgctcggctaccgggctttcctggccctcgcgttcgacgagcgcaaggcccggacactcgggctgcgtccccggctcgcccatgccgtgctgctcggcctgctggcgctggccatcgtggcctccttccacatcgtgggcacgctgctcgtcctcggtctgctcatcgccccgcccgcggcggccatgccctgggcgcgaagcgtccaggcggtcatggtcctcgcggcgctcctcggcgccgccgccaccttcggcggcctgctcctgtcctggcatctgcgcaccgcggccggagcgaccgtctcggccctcgccgtcgctctcttcttcctgtcccacctggcatccggacttcggcaccgccgccgtgcgcgccggggcggtcttgccgaaccggcggtcgccccgggccgcgacctcctccacgtcctgaccgagagaaacctgaggcgatctccttgctcgtccgaaaaaacgtcacatcgctggctccggcgcttgcggccgtgatcctcctgaccgccggatgcgggggcggggacgaggccaagtccggttccgggcccgcctcttcgtcccccactccgcacggctatgtcgaaggcgccaccgaggcggccgagcagcagtccagacttctgctcggcgaccccgggagcggtgagacccgcgtgctggacctgatcaccggcaaggtgtacgacatcgcccgcagccccggtgccaccgcactcaccacggacggccgcttcggctacttccacggcccggacggcatacgggtgctcgacagcggtgcgtggatggtggaccacggcgaccacgtccactattaccgcgcgaagatcaaggaggtcggcgaactcccgggcggcaccggtacgagcatccgcggcgacgcgggcgtgaccgtggcctcgtcggcggacgggaaggcgagcgtgtatcgcagggcggacctggagaaaggcgccctgggcacgccgtccccgctgcccggcacgttcgccggcgccgtcgtgccgtacgcggaacacctggtgacactcaccgctgagagcggggctccggcgaaggtcgccgtgctggaccgttccggcaagcgcgtcgccgctccggaggcggagtgcgaggagcctcagggcgacgcggtcacccggcgcggggttgtcctcggctgcgccgacggcgctctgctcgtccatgaggacgacggcgccttcacggcggagaagattccgtacggcgaggacgtgccgaagaccgagcgggccgtggagttccggcaccgcccgggcagcagcaccctcacggcacccgccggcaaggacgctgtctgggtcctggatgccggcgagggcgcctggacccgggtgaagaccggccccgtggtcgccgccaacacggccggcgaaggctcgccgctggtcgtcctggagaccgacggggccctgcacggctacgacatacccaccggcaaggagaccggcgtgaccgatcccctgctcaaggaactgcccggaaccggtgcgggcggcggcgcggctccggtgatcgaggtggaccgcagccgggcctacctcaacgaccccgagggcaagcgcgtgtacgagatcgactacaacgacgatctccgcgtggcccgtacgttcgacgtcgacgtacggccgtccctgatggtggagacgggccgatgagcgcgcgcgtgggcgctccacggatgcgtgccctgctggtgtccctggccggattcttcgtcgtcgccggtgcggcgaccggctgcgcgggcggcggagacgaacggccccgggtcgtggtgaccaccaacatcctcggcgacatcacccgggagatcgtcggggacgaggccggcgtcagtgtcctgatgaagcccaacgccgacccgcactccttcggcctctcggccgtgcaggccgctgagttggagaacgccgacctggtcgtctacaacgggctcggcctggaggagaacgtgttgcggcacgtggaggctgcccgcgagtccggagtggccgccttcgccgcgggtgaggcggccgacccgctcaccttccatgccggacaggacggcggccccgaagaggacgccggcaagcccgatccgcacttctggaccgaccccgaccgcgtacgcgaggccgccggcctgatcgccgaccaggtcgccgagcatgtggagggcgtcgacgagaagaaggtccgggagaacgccgagcggtacgacggacaactcgccgacctcacgggatggatggagaagtccttcgccgccatccccgaggaccggcgtgccctggtgaccaaccaccacgtcttcggctacctcgccgaccgcttcggcctccgcgtcatcggcgcggtcatccccagcggaaccacgctcgcctcgcccagctcctccgacctgcgctctctcacccaggccatggagaaggccaaggtgcgcaccgtcttcgccgactcctcccagcccacccggctcgccgaggtcctgcgccaggagatgggcggcgacgtggacgtcgtctcgctctactccgagtcgctgaccgagaagggcaagggcgccggaacctacctggagatgatgcgcgccaacacctccgccatggccgagggcctcaccggcgactgaacgagcttccccgcggcacggcacttcgagcgccggccgctccaccccacaaacccgcgcctgagggccggagaggaaacaccgatcatgaacaagcccacccgcgccagagtcttcacgggcacggcgctggtcgtggcggcgtcgatggcgctgaccgcctgcggcggcaacggcaacgacgacgccccttccggcaaagagcccaaggagcagaagagcagcgaggccgcggcggtcgggaacccgatcgtcgcctcgtacgacgggggactgtacgtcctcgacggcgagaccctgaagctcgcgaagacgatcgcactgcccggcttcaaccgggtcaacccggcgggcgacaacgagcacgtcgtcgtctccacggactccggcttccgcgtgttcgacgccacccgacaggagttcaccgacgccgagttcaagggttccaagccggggcacgtcgtccggcacggcggcaagacggtcctgttcaccgacggcacgggagaggtgaacgtcttcgaccccgccgacctgtccgacgggaagaagccggacggccgcacctacacgtccgcgaagccccaccacggtgtcgccatcgaactggccggcggagaactcgtcaccaccctcggcaccgaggagaagcgcaccggagccctcgtcctggacaaggacaacaaggagatcgcacgcgccgagaactgccccggagtgcacggcgaggccgccgcccagggcgaggtggccggcttcggctgcgaggacggcgtcctgctctacaaggacggcaagttcaccaaggtcgacgcccccggcgactacgcccgcaccggcaaccaggccggcagcgacgcctccccgatcctcctcggcgactacaagaccgaccccgacgccgaactggaacgccccacccgcatatccctgatcgacacccgtacggcgaagatgaagctggtcgacctcggcaccagctactccttccgctccctcgcccgcggcccgcacggcgaagccctcgtgctcggcaccaacggcaccctccacgtcatcgacccggagaccggaaaggtcgagaagaagatcgacgcggtcggcgactggaccgagcccctggactggcagcagcccaggcccaccctgttcgtccgggaccacacggcgtacgtctccgaaccgggcaagcgccaactccactccatcgacctggaatcggggaagaagctggcatccgtcaccctgccgaagggcaccaacgaactgtccggcacggtcgccggtcactgacctgtcccgttccctcttttcctcgggccccgaggagcgcaacgcctgccggattcgtgttccggcaggcgttgctgtcgtcggagcctgcaaccttgacgaccctgccgaggagaaccgtttcaccacggaggcctggggtgcgcagatggaactgtgcgcgctccactccagggaccgtgacgccaccgtcaagacctgtgccgccggccgcccgaaacgcaagccgtcgtacggcttcctgggccgtcccacagccgccgaggagctcgccgcggtcacgagctgcggcggcggtgcctgcgccgccaccacacgatcgcgagcgtgaaggcggccgcaacgcccagcagggcccacaggatggtggagagcacgctctcggcctcgcgcagggaggtcgagaccagtgttcccgcggacacgtagagcgcggaccacatcgcggctccggcgagggaggcgggcaggaagcggaggtagcgcacggagccgacgccggcggtcgcgggggtgagggtgcgtaccacgggcaaaaggcgggtcaggaagacggcgcgcgccccgtaccggtggcagagctcttgcgcgcggtcccagtggtgctgcccaatccgccgtaccaggcgcgtctcccgcatccgctgcccgtagcggatgccgaggaagtagccgatgtggtcgccggccgagctgctgagtgtgacgacgaggaagagggccaacagcgggcgtgtcccctccgttccggcgctcagggccagtaccgcgacctcgccggggacggccatgccggccccaaggccggattccgcgaacgcgaatacggaggccagcgcgaatctggtgaccgggttcatgtccgacaccgctgtcagtacatcgttcatccacgacacggcagccccgctctgtctctcctcgttcgtggagccctcccgacggcgccacggggattcccgcgcccttcttccgagaacacaccgaagagaacagcggaacgacttcccggcgtcaccggacgcatacccgggcggccggtgggagcgcctgaaaaagaacgaagggacaccaacctaccagggaaccgctggacgactcctccctcccggccacgaccaccccgcgacggaccccgcagaccgcccccggcaaccattccccttcacccaccccgtccgccgacggagcacgggggctcgccgtacagatccgggcctcgttgatccactgggtgagaacggcggggccggccccggccgcgagggcggcccggtagtgagacagacgcttctcgccctttctcaccgcccgccgggcctgctcgacctccggggcgcggccatcggatgcggcagccgcgtgcgtcagggcggtgagggtggcggtcagacgttccggcgcgaaggcacgggcgatccactggtcgagtgccgggcagatcatgtcctcccgcaggcacatcatgtcctcccgcgggcacacggtgcgggggtgaccgagtccggggtggagggccttgttcctgggacccgctcctgaccgtgtacgggcgtccgaggtcggctcaggcgatcgcggtcaactaccccgtgggctacagtgcgttgactgcgggcagtgcacacgcccaccggcaccgacgacgcggagaagcatgggcgggagcgcgatcaggacccggcagctgaccaagcacttcggtgcggtgcaggcgctggtcggcgtggatctggaggtgcccgcggggagcgtgctggggctcctgggacacaacggtgccgggaagaccacgctgatccagatcctctcgacggtgctccccccgtccggtgggtccgccgaggtcgccggcttcgacatcgtgcgcgatgcccgacgggtacgcgcctgtatcggggtgacggggcagttcgctgccctggacgagcatctgtccgggctcgccaatctggtgctgatctcccggctgctgggtgcccggccgagggaggccagacgccgggcggccgaactggtcgaacaattcggtctcaccgaggcagcggacagaccgatgcggacctactccggcggaatgcggcggcgcatcgacctggcggcgagtctggtggccaggccctcggtgctgttcctcgacgagcccaccaccgggctggacccggtgagccgcaccgcactctgggagacggtggaagggctggtcgccgagggcacgacggttctgctgaccacccagtacctcgacgaggccgaccggctggcggaccggatagcggtgctgtcgtccggccacgtggtgacggtcggcacggcggcggagctcaaggcggcgggcacccggtccgtccgcctgaccttcgggtccgcggcggatctggagagcgcggaaggagcgctgcgcctggagggcctcggcctcacaacggatccggtgtcccggacggtgtcactgccgctggcggcaacggccgagctggccgggatcttccggattctcggcgcggcgggcgtggagctcgccgaactggcgctcaaggagcccacgctggacgacgtgtatctgagcctggcggagagctgggagaccacgagcgggggaacggtccggtgctgaccacacgacgtacgggtccggggacctcgccggtggcggacgggcccgggtggcgcggcgggggtgcggggatcggcacccagttccgggtgctgaccggccggcagttccggatcatctacggggaccggcggatcgcgctgttcagcctgctccagccgatcatcatgctcatgctgttcagtcaggtgctgggccgcatggccaatccggagatcttcccgccgggtgtgcgctacctcgactacctggtgccggctctgctgctgacgaccgggatcggttccgcgcagggcggcgggctgggtctcgtcagggacatggagtccgggatgatggtccggctgcgggtgatgccggtacggctgccgctggtcctggtggcccggtcgctggccgatctggcgcgggtcgccctgcagctcgtggcgttgctcgcctgtgcgatggggccgctgggctaccggccggccgggggcgtgtcggggatcgtcggcgcgacgctgctcgcgttgctcgtcgcgtggtcgctgatctgggtgttcctggccctcgccgcgtggctgcggagcatcgaggtgctgtccagcatcgggttcctcgtcaccttccccctgatgttcgcgtcgagtgccttcgtcccgctcgacattctgccgggatggctcagggtcatcgcgacggtcaatcccctcacgtacgcggtggaggcgtcccgcgatctggcgctggaccacagcgcgctgggcgcggcgctcgcggccgtcggcaccagtcttgcgctcttggcggtgaccggtctgctggcggtacgcgggctgcggcgcccgccgggtgcgggcggcccgcaccggacgccctgacccctccccaccacctgcccagtgtgacgtttgcgcagatgagaacgtgcgtaaacgccgcatacgcaaagatcgtccctgccgggacccattgacgttcgcaggggcgtggaacatactggcgatcaagtcgcacaggaaccaacaggcacaccaaccacaggcgttacagggggggttggtgtttcgtccatatcaagtggtttggtccgccgaagcggttggacctcacatgacggcaacagggcattcgcacatgcctgatgacgggacggcacacctcacgcagcggcgaccggtcgcaagccggacgcggaatgactccctgccttacaggtatgcgagcgcggatgcgtcgttcgaccggagtcaggagggggagtgcctgccgtgagtgagagccgctgtgccgggcagggcctggtgggggcactgcggacctgggcacggacacgtgcccgggagactgccgtggttctcgtacgggacaccggaaccaccgacgacacggcgtcggtggactacggacagctggacgagtgggccagaagcatcgcggtgaccctccgacagcaactcgcgccggggggacgggcacttctgctgctgccgtccggcccggagttcacggccgcgtacctcggctgcctgtacgcgggtctggccgccgtaccggcgccgctgcccggggggcgccacttcgaacgccgccgtgtcgcggccatcgccgccgacagcggagccggcgtggtgctgaccgtcgcgggtgagaccgcctccgtccacgactggctgaccgagaccacggccccggctactcgcgtcgtggccgtggacgaccgggcggcgctcggcgacccggcgcagtgggacgacccgggcgtcgcgcccgacgacgtggctctcatccagtacacctcgggctcgaccggcaaccccaagggcgtggtcgtgacccacgccaacctgctggcgaacgcgcggaatctcgccgaggcctgcgagctgaccgccgccactcccatgggcggctggctgcccatgtaccacgacatggggctcctgggcacgctgacaccggccctgtacctcggcaccacgtgcgtgctgatgagctccacggcattcatcaaacggccgcacctgtggctacggaccatcgaccggttcggcctggtctggtcgtcggctcccgacttcgcgtacgacatgtgtctgaagcgcgtcaccgacgagcagatcgccgggctggacctgtcccgctggcggtgggccggcaacggcgcggagcccatccgggcagccaccgtacgggccttcggcgaacggttcgcccggtacggcctgcgccccgaggcgctcaccgccggctacgggctggccgaggccaccctgttcgtgtcgaggtcgcaggggctgcacacggcacgagtcgccaccgccgccctcgaacgccacgaattccgcctcgccgtacccggcgaggcagcccgggagatcgtcagctgcggtcccgtcggccacttccgcgcccgcatcgtcgaacccggcgggcaccgtgttctgccgcccggccaggtcggcgagctggtcctccagggagccgccgtctgcgccggctactggcaggccaaggaggagaccgagcagaccttcggcctcaccctcgacggcgaggacggtcactggctgcgcaccggcgatctcgccgccctgcacgaagggaatctccacatcaccggccgctgcaaagaggccctggtgatacgaggacgcaatctgtacccgcaggacatcgagcacgaactccgcctgcaacacccggaacttgagagcgtcggcgccgcgttcaccgtcccggcggcacctggcacgccgggcttgatggtggtccacgaagtccgcaccccggtccccgccgacgaccacccggccctggtcagcgccctgcgggggacgatcaaccgcgaattcggactcgacgcccagggcatcgccctggtgagccgcggcaccgtactgcgtaccaccagcggcaaggtccgccggggcgccatgcgtgacctctgcctccgcggggagctgaacatcgtccacgcggacaagggctggcacgccatcgccggcacggccggagaggacatcgcccccactgaccacgctccacatccgcaccccgcgtaatcgccggagggcggccctgccctggaacgggcaccgcggtgcccgccgacagcgaggagtagctccacatgaacccgcccgaagcggtcagcacgcccagcgaggtcaccgcgtggatcaccggacagatcgccgagttcgtgaacgagacacccgaccggatcgccggtgacgcacccctgaccgaccatggcctcgactccgtctccggagttgccctctgcgcgcaggtcgaggaccgctacgggatcgaggtcgacccggagctgctgtggagcgtccccacactcaacgagttcgtccaggcactgatgccccagttggccgaccgcacctgaggggatccgcgagagatggacatgcagtcgcagcgcctcggcgtcaccgccgcccaacagagcgtctggctcgccggccagctggcggacgaccaccgcctgtaccactgtgcggcgtacctgtcactcaccgggtccatcgacccgcggacactcggcacggcggtccggcggaccctcgacgagaccgaggcgctgcgtacccggttcgtaccgcaggacggggaactgctgcagatcctcgaacccggtgccggacagctcctgctggaagccgacttctccggcgacccggaccccgagcgggcggcacacgactggatgcacgcggcgctcgccgcaccggtccgcctcgaccgcgccgggaccgccacccacgccctgctcaccctcggcccgtcccgccacctgctgtacttcggctaccaccacatcgcgctcgacggctacggtgccctgctccacctgcgccgcctcgcccacgtctacaccgccctcagcaacggggacgaccccggcccctgcccgttcggccccctggccggtgtcctcacggaggaggcggcctaccgtgactccgacaaccatcggcgcgacggggaattctggacccggtccctcgccggtgcggacgaggcccccgggctgagcgagcgggaggccggcgctctcgccgtcccgctgcgccgcaccgtggagctgtccggcgaacggacggagaagctggccgcctcggccgcggccactggagctcgctggtcgtcactgctcgtcgccgccaccgccgcgttcgtacgccgccacgctgccgccgacgacaccgtcatcggcctgcccgtcaccgcccggctcaccgggccggcgctgcgtaccccgtgcatgctcgccaacgacgtgccgctgcgcctcgacgcccggctcgatgccccgttcgccgcgctccttgccgacaccacccgcgccgtcggcacgctggcgcgccaccagcggttccgcggggaagaactccaccggaacctggggggcgtcggccgcaccgcgggcctggcgcgggtcaccgtcaacgtcctggcgtatgtcgacaacatccggttcggcgactgccgggccgtggtccacgagttgtcctcgggaccggtccgcgacttccacatcaactcctacggcacccccggcacccccgacggcgtccagctggtcttcagcggtaaccccgccctgtacacggccaccgatctggccgaccaccaggagcggttcctgcgcttcctcgacgctgtgaccgccgacccggacctgccgaccggaagacaccgcctcctgtcgccgggcacccgcgcccggctgctcgacgactcccgcggcacggaacgccccgtaccgcgtgccaccttgccggaactcttcgccgaacaggcccggcgcacccccgacgcgcccgccgtccagcacgacggcaccgtcctcacctaccgcgacctgcaccggagtgtcgaacgggcggccggacggctggccggcctcggcctgcgtaccgaggacgtcgtcgccctcgccctccccaagtccgccgagagcgtcgcgatcctgctcggcatccagcgggccggcgccgcctacgtgccgctggaccccacccatccggccgagcggctggcccgtgtactcgacgacacccgaccccggtacctcgtcaccaccggacacatcgacggcctgtcccaccccacgccgcagttggccgccgccgacctcctccgtgagggcggcccagagcccgccccgggccgcccggcacccggcaacgcggcgtacatcatccagacctccggctccaccggacggccgaagggtgtcgtcgtcactcacgaagggctggccaccctcgccgccgaccagatccggcgctaccgcacgggaccggacgcccgcgtactgcagttcatctccccggggttcgacgtcttcgtctccgaactgagcatgaccctcctgtccggcggctgcctggtgataccgccggacggcctgaccggccgtcacctcgccgacttccttgccgcggaggccgtcaccaccacatccctcacccccggcgcactcgccaccatgcccgccacagatctcccgcacctgcggactctgatcgtcggcggagaggtctgcccgccggagatcttcgaccagtggggccggggccgggacatcgtcaacgcgtacgggcccaccgagacaaccgtcgaggcgaccgcctggcaccgtgacggtgccacccacggccccgtcccgctcggccgccccaccctcaaccggcgcggctacgtcctcgacccggcgctcgaacccgtccccgacgggacgaccggcgaactgtacctggccggcgagggcctcgcccggggctacgtcgctgctcccgggcccaccgccgagcgtttcgtcgccgacccgttcggcccgcccggcagccgcatgtaccgcaccggtgacctggtgcggcggcgctccggcggcatgctggaattcgtcggacgagccgacggacaggtcaaactccgcggcttccgcatcgaactcggcgaggtccaggccgcgctcaccgctctccccggggtacgtcaggccggcgtcctgatccgcgaggaccgccccggggacccccggctcgtcgggtacatcgtgcccgcgcccggcgccgaaccggacgccggtgagctccgtgcggccctggcccgtaccctcccgccccacatggtgccctgggcgctcgtccccctccccgcactgccgctgacgtccaacggcaaactggacagggcggcccttcccgtccccgccgcccgcgccggcggatccgggcaacgcccggtcaccccacaggagaagacactctgcgccctgttcgccgacgtcctcggcgtaacggaggtcgccacggacgacgtgttcttcgagctcggcggccactccctcaacggcacccggctgctcgcccggatcaggaccgagttcggcaccgacctcaccctccgcgacctgttcgccttccccaccgtcgccggccttctcccgctcctggacgacaacggacggcagcacaccaccccgccgctgcctccgcgcccggagcgcctccccctgtcgcacgcgcagcagcgactgtggttcctcgaccaggtcgaaggccccagccccgcgtacaacatccccaccgccgtccggctcgaaggcccgctcgacatcccggccctcgctgtcgccctgcaggacgtcaccaaccgccacgagcccttgcgtactctcctcgccgaggactccgaaggcccccaccaggtcatcctgccccccgaggccgcccgccccgaactgacccacagcaccgtcgcgcccggcgatctcgccgcagccctcgccgaagccgcacgccgccccttcgacctcgccggtgagatcccactcaaagcccacctgttcggctgcggcccggacgaccacaccctgctgctcctcgtccaccacaccgccggcgacggagcctccgtcgaggtcctcgtacgcgatctcgcccacgcctacggcgcccgccgcgccggcgacgccccgcacttcgagccgctgcccctgcagtacgccgaccacaccctgcgccgacggcacctgctggacgatccgtcggacagcacacagctcgaccactggcgcgacgccctggccggcctgcccgagcagctcgaactgcccaccgaccacacccggcccgccgttcccacccgccggggcgaggcgatcgccttcaccgtgcccgagcacacgcaccacacgctgcgggccatggcccaggcccacggcgtcaccgtgttcatggtcatgcaggccgcgctcgccgccctgctgtcgcggcacggcgcgggccacgacatccccctcggaacacccgtcgcgggccgctccgacgacggcacggaagacctcgtcgggttcttcgtcaacacgctcgtactgcgcaacgacgtctccggggacccgacgttcgcggaactcgtgtcgcgggtgcgggccgccaacctggacgcgtacgcctaccaggacgttcccttcgagcgtctcgtcgacgtactcaaaccggagcggtccctgtcctggcacccgctcttccagatcatgatcgcgtacaacggcccggcgacgaacgacaccgccgacgggtcccgcttcgcgggcctcaccagccgcgtccatgccgtccacaccggcatgtccaagttcgacctgtcgttcttcctcaccgagcacgcggacggcctcggcatcgacggcgctctcgagttcagcaccgatctcttcacgcggatcaccgcggagcgcctggtccagcgctacctcaccgtcctggagcaagccgccggagcaccggaccgccccatcagttcgtacgaactcctcggcgacgacgaacgcgcactcctcgcccaatggaacgacaccgcccaccccacccccccaggcacggtgctcgatctcctcgaaagccgtgcggcgcggacccccgaccggccggccgtcgtcgagaacgaccacgtcctcacctacgccgacctgcacacccgggccaaccggctcgcccgccacctgatcaccgcccacggcgtcggtcccgaacgtctcgtcgccgtcgccctgccccggtccgccgagctgctggtggcacttctcgcggtcctcaagaccggagccgcctacgtccctctcgacctcacccaccccgccgagcgcaccgccgtcgtcctcgacgactgccggccggccgtgatcctcaccgacgccggtgcggcccgtgaactgccgcggcgcgacatcccacagctccgcctcgacgaacccgaggtccacgcggcgatcgcggaacaaccggggggtccggtcaccgaccgggaccgcacgtgcgtcactccggtcagcggcgagcacgtggcatacgtgatctacacatccggctccacgggccggcccaagggtgtggcggtggaacaccgttcactggccgacttcgtgcggtactccgtgaccgcgtaccccggagccttcgacgtcaccctgctgcacagccccgtgaccttcgacctcaccgtgacctcgctgttcccgccactggtcgtcggtggcgccatccatgtcgcggacctgaccgaggcgtgcccaccgagcctggccgcggcgggcgggccgacgttcgtcaaggccacaccgagccatctgccactgctcacgcacgaggcgacatgggccgcgtccgcgaaggtgctgctcgtcgggggcgagcagttgctgggaagggagctggacaagtggcgggccgggtcgccggaggccgtcgtcttcaacgactacggccccaccgaggccacggtcaactgcgtggacttccgtatcgatccgggacaaccgatcggtgcggggccggtggcgatcggccgcccgttgcggaacacgcgggtgttcgtgctcgacggtgggttgcgggcggtgccggtcggtgtggtcggtgagctccatgtggcgggcgaggggctggcgcggggttatctcgggcagccgggtctgacggcggagcggttcgtggcgtgtccgttcggtgatgccggggagcggatgtaccgcacgggtgacctggtgcggtggcgtgcggatgggatgctggagttcgtcggccgggtcgacgatcaggtcaaggtgcggggtttccggatcgagctgggcgaggtggaggccgctgtcgcggcctgcccgggtgtggaccgctccgtggtggtggtacgggaggaccgaccgggagaccgccggctggtggcgtatgtgacggccgccggtgacgaggcggaggggctggcaccgctgatcgtggagacggccgcgggccgtctgcccgggtacatggtgccgtcggccgtggtcgtactggacgagattcccctgacgccgaacggcaaggtggaccgtgccgcgctgcccgcgccgcgcgtcgccccggccgcggagttccgcgtcaccggatcaccccgtgaagaggctctgtgcgccctgttcgcggaagtgctgggcgtggaacgggtcggcgtggacgacgggttcttcgacctcggcggagacagcattctgtccattcaactggtggcgcgggcgcgccgggcgggtctggaggtgtcggtgcgggacgttttcgagcaccgcaccgtacgggcgctggccggtgtggtgcgggagtccggaggcgtcgctgccgccgtcgtggactccggtgtgggtgcggtggagcggtggccggtggtggagtggctggcggagcgtggtggcggtgggctcggcggtgcggtcagggccttcaaccagtccgtcgtggtcgccacaccggccggtatcacctgggacgaactgcggacggtcctggacgcggtacgcgaacgccacgacgcctggcggctacgggtagtggattccggtgacggcgcctggtccctgcgcgtcgacgcgcccgcccccggcggtgagcccgactggatcacccggcacggcatggccagcgccgacctggaggagcaggtgaacgccgtgcgggccgccgccgtggaggcccggagccggctcgatccactgaccggacggatggtccgcgcggtatggctggaccgtggacccgaccgccggggagtcctggtcctggtggcgcaccacctggtcgtcgacggcgtctcctggcgcatcgtcctcggcgacctcggcgaagcctggacacaggcacgcgctggcgggcatgtgcggttggacacggtcggcacatcgctgcgcggctgggcggcggcgctggcggaacagggccgccacggcgcccgcgccaccgaagcaaacctgtgggcacagatggtccacggctcggaccctctggtcggcccacgcgcggtggacccttcggtggacgtcttcggcgtggtggagtcggtgggttcacgggcgtcggtgggggtgtcgcgtgccctgctgacggaggtcccgtcggtcctgggtgtgggcgtgcaggaagtgctgctggcggcattcggcctggcagtgacgcgctggcgcggccgcggcggaagcgtcgtcgtggacgtcgagggtcacggccgcaacgaagacgccgtacccggcgcggacctctcccgcaccgtggggtggttcaccagcatctaccccgtccgcctccccctcgagccggcggcctgggacgagatacgcgccggcggtcccgccgtcggacgcaccgtccgcgagatcaaggaatgcctccgcaccctgcccgaccagggcctgggctacggcatcctgcgctacctcgaccccgaaaacggacccgccctcgcccagcaccccaccccgcacttcggcttcaactacctcggacgggtctcggtctcggcggacgctgcctcactggacgaaggcgacgcccatgccgacgggctcggcggcctcgtcggcggcagggcagcggcggactccgacgaggaacagtgggccgactgggttccggtgtcgggtccgttcgcggtgggcgcgggtcaggaccccgttctgccggtggcccacgcggtggagttcaacgcgatcaccctggacacacccgacggcccccgcctcagcgtgacatggtcgtggccgacgacactgctgtccgaatcccggatacgagaactcgcccgcttctgggacgaagccctcgaagggctggtcgcacacgcccgccgtcccgacgcgggcggactgaccccctcggacctgccgctggtcgccctcgaccacgcggaactggaggccctgcaggccgacgtcaccggtggcgtgcacgacatcctgcccgtatcaccgcttcaggaaggactgctcttccacagctccttcgccgccgacggggtcgacgtctacgtgggacaactcacgttcgacctgaccggaccagtcgacgccgaccacctgcacgccgtggtcgaaagcctggtgacacgccacgacgtcctgcgcaccggctaccgccaggcacagtccggcgaatggatcgccgtcgtggcacgacaagtccacaccccctggcagtacatccacacactcgacacggacgccgacaccctcacaaacgacgagcgctggcggccgttcgacatgacgcagggcccactcgcacgattcaccctcgcacgcatcaacgacacccacttccgcttcatcgtcacgtaccaccacgtcatcctcgacggctggtccgtggcggttctcatacgcgaactcttcaccacctatcgcgacaccgccctcggccgccggccggaggttccgtactccccaccgcgccgtgacttcatggcgtggctcgccgaacgcgaccagaccgctgcgggacaggcatggcgttccgcgctggccggactcgcggagcccacagtgctcgccctcggaacggagggcagtggggtgattcccgaagtccttgaggaagagatcagcgaggaactgacctcggaactggtggcgtgggcgcgtgggcgtggtgtgacggtcgcgtcggtggtgcaggcggcctgggcgttggtgctggggcggctggtgggccgggacgacgtggtgttcggcctgaccgtgtcgggccggcccgccgaagtggcgggtgtggaggacatggtcggtctgttcgtgaacaccattccgttgcgggcccggatggacccggcggagtcactgggcgccttcgtggagcggctgcagcgggaacagacggaactgctcgagcaccagcacgtccggctggccgaggtccagcgctgggccggacacaaggaactcttcgacgtcggaatggtcttcgagaactacccgatggattccctgctgcaggattcactgttccacggcagtggcctgcagatcgacggaatacagggtgccgatgcgacgcatttcgctttgaacctggcagtggttccccttcccgccatgcgattccggctcggctatcggccggacgtgtttgacgcgggtcgggtgcgtgagctgtggggttggatcgtccgggccttggagtgcgtggtctgcgagcgtgatgtgccggtgtccggtgtcgatgtgctgggtgccggtgagcgggagacgctgctgggctggggtgcgggcgcggaacccggcgtgcgtgcgctgccgggtgcgggtgcgggtgcgggtgcggggctggtcgggttgttcgaggagcgggtgcggaccgacccggacgcggtggccgtgcgcggcgcgggagtggaatggagttacgcggagctgaacgcgcgggcgaatgcggtggcccggtggctgatcggccggggcgtgggacccgagcgcggtgtcggggtggtgatggaccgcggcccggacgtggtggccatgctcctcgcggtcgccaaaagcggcggcttctacctgcccgtcgacccgcaatggcccaccgaacgcatcgactgggtactcgccgacgccggcatcgacctggccgtcgtgggcgagaacctggccgctgcggtcgaggccgtccgcgactgcgaggtggtcgactacgcgcagatcgcccgcgaaacacggctgaacgagcaggcggccaccgacgccggtgatgtgacggacggggagcgcgtgtcggctctgctgtccgggcatccgctgtatgtcatctacacctccggctcgacgggcctgcccaagggcgtggtggtcacccacgcctcggtcggcgcctatctgcggcgcggccgcaacgcctaccgcggcgccgccgacggcctgggccacgtgcactcctcactcgcgttcgacctgaccgtgaccgttctgttcacccccctggtctccggcggctgcgtcaccctcggcgatctcgacgacaccgccaacggcctgggcgccaccttcctcaaggccactccttcccacctgcccctgctcggccaactcgaccgggtactcgcccccgacgccaccctcctcctcggcggcgaagccctcaccgccggcgccctgcaccactggcgcacccaccacccccacaccacggtcatcaacgcctacggcccgaccgaactcaccgtcaactgcgccgaataccgcatcccccccggccactgcctccccgacggccccgtccccatcggacgccccttcaccggccaccacctcttcgtcctcgaccccgccctccgcctcacaccccccgacaccatcggcgaactgtatgtggccggtgacggcctggcgcggggctatctcgggcgcccggacctgaccgccgaacgcttcgtggcctgccccttccgcagccccggcgaacgcatgtaccgcaccggcgacctcgcacgctggcgcagcgacggaacactcgaattcatcggccgtgccgacgaccaggtcaagatccgcggcttccgcatcgaactcggcgaagtcgaggcggctgtcgcggcgcatccgcacgtggcgcgggccatcgccgtcgtacgcgaggaccggcccggcgaccagcgcctggtcgcgtacgtgacaggcagcgacccgagcggcctgtcctcggcggtgacggacaccgtcgccggccgcctgcccgcgtacatggtgccgtcggccgtcgtcgtactggaccagatccccctcacccccaacggcaaggtcgaccgcgccgccctccccgcgcccgggaccgcctccggaaccacctcccgagcacccggcacagcccgtgaagagatcctgtgcaccctgttcgccgacgtactcggtctggatcaggtcggcgtggacgaggacttcttcgacctcggcggccattccctgctcgccacccgcctcacctcacggatccggtcggccctcggcatcgacctcggtgtccgagccctcttcaaagccccgaccgtcggccgcctggaccagctgctccagcaacagaccaccagcctccgggcacccctggtcgcgcgggagcgcaccggttgtgagccgctgtcgttcgcgcagcagcgcctgtggttcctccaccagctcgaaggccccaacgccgcgtacaacatccccatggctctgcgactcaccggccgcctggacctgaccgcgctggaagcggccctgacggatgtgatcgcccgccacgaaagcctgcgaacggtcatcgcccaggacgattcgggcggcgtgtggcagaacatcctgcccaccgacgacacccgcacccacctcaccctcgacaccatgccggtcgacgcgcacaccctgcagaatcgggtggacgaggccgcccgccatccgttcgacctcaccaccgagatccccctccgcgccaccgtcttccgcgtcaccgacgacgagcacgtcctcctgctcgtgctccaccacatcgccggcgacggctggtccatggcccccctggcccacgacctgtccgccgcctacaccgtcagactcgagcaccacgcaccgcaactgcccgctctggccgtccaatacgccgactacgccgcctggcaacgcgacgtcctgggcaccgagaacaacacatcgagccaactctccacccaactcgactactggtacagcaaactcgaaggcctccccgccgaactgaccctccccaccagtcgcgtccggcccgccgtggcctcccacgcatgcgaccgcgtcgagttcaccgtgccccacgacgtgcaccaaggcctgaccgcactcgcccgcacccagggcgccaccgtcttcatggtggtgcaggcggccctggcggccctgctgtcccgactcggcgccggcaccgacatccccatcggcacccccatcgccggccgcaccgaccaggcgatggagaacctgatcggactcttcgtcaacaccctcgtactgcgcaccgacgtctccggggacccgaccttcgccgagctcctggcccgtgtgcgcaccactgctctcgacgcatacgcacaccaggacatccccttcgaacgcctggtagaagccatcaaccccgaacgatccctcacccggcaccccctcttccaggtcatgctcgccttcaacaacacggaccgccgatccgcgctcgacgcgctcgacgccatgcccggccttcacgcacgaccggccgacgtcctggctgtgaccagcccctacgatctcgcgttctcgttcgtggagacacccggcagcacggagatgcccggcatcctggactacgcaaccgacctgttcgaccgctccacggccgaggccatgaccgaacgtctggtgcgcctcctcgcggagatcgcccgccggcccgagctgtccgtgggcgacatcggcatcctgtcggccgacgaggtgaaggccctcagccccgaggctcccccggcagccgaggaacttcacacctccacactgcctgagctgttcgaggagcaggtggcggctcggggccatgcggtcgcggtggtgtgcgaaggagaggagctgtcgtacaaggagttgaacgcgcgggcgaatcgcctggccagggtgctgatggagcgcggcgcaggccccgaacggttcgtgggcgtggcactaccgcgtggcctggacctcatcgtggcactcctggccgtgaccaaaaccggcgccgcatacgttccgctcgaccccgaataccccaccgaccgcctcgcgtacatggtcaccgacgccaaccccaccgcggtcgtgacctcaacggacgtacacatccccctgatcgccccccgcatcgagctcgacgacgaggcaatccgcaccgaactcgccgccgctcccgacacagccccctgtgtcgggagcggccccgcccaccccgcctacgtcatctacacctccggctccaccggtcgccccaagggcgtcgtcatcagccacgccaatgtcgtacgcctgttcaccgcatgctccgacagtttcgacttcggaccggaccacgtctggacgctcttccactcgtacgccttcgacttctcggtctgggagatctggggcgcgctgcttcacggcgggcggctcgtcgtcgtgccgttcgaggtgactcgttctcccgccgaattcctcgcgctgctcgccgagcagcaggtcacgctgctgagccagacaccgtccgcgttccatcagctgacggaggccgcccgccaggagccggcgcgctgcgccgggctggccctgcgacatgtggtcttcggcggcgaggcgctcgacccgtcgcgactgcgcgactggttcgacctgccgctcggctcacggccgacgctcgtgaacatgtacggcatcaccgagaccaccgtccacgtcacggtgctcccgctggaggatcgcgcgacgagtctttccggcagcccgatcggtcggcccttggccgatctgcaggtgtacgtcctcgacgaacggctccgcccggtgcccccaggcaccgtcggcgagatgtacgtggcaggcgccggtctggcccgcggctatctgggacgccccgctctgaccgccgagcggttcgtggccgacccgaattcccgttccggcggccgtctgtaccgcacaggcgacctggccaaggtgcggcccgacgggggactggagtatgtgggccgcggggaccggcaggtgaagatccgcggcttccggatcgaactcggcgagatcgaggccgcgctggtcacacacgcgggtgtcgtccaggcggtggtcctggtgcgggacgagcagaccgacgaccaacggcttgtcgcgcacgtggtgcccgcgctgccgcaccgggcgccgaccctggccgaactccacgagcacctcgcggcgaccctgccggcgtacatggtgccgtccgcgtaccggaccctggacgagctgccgctgacggccaacggaaagctcgaccgcgcggcgctggccgggcagtggcagggcggaacccgcacccggagactgcctcggacgccgcaggaagagatcctgtgcgagttgttcgccgacgtcctccggttgcccgccgccggggccgacgacgacttcttcgccctgggaggccattccctgctggcgacgcgcctcctgtcggctgtcaggggcaccctgggtgtggaactcggcatccgcgacctcttcgccgcgcccacgcctgccgggctcgcgaccgtactggcggcctccggcaccgccctgccacctgtgaccaggatcgaccggcgccctgaacggctcccgctgtccttcgcacagcggcgactgtggttcctgagcaagctggaagggcccagcgccacctacaacatcccggtcgccgtccggctcaccggcgccctcgacgtcccggctctccgggccgccctgggggacgtcaccgcacggcacgaatcactgcgtacggtcttccccgacgacgggggcgaaccccgccagctggtgctcccacacgccgaaccccccttcctcacgcacgaggtgaccgtcggagaggtggcggaacaggcggcgtccgccaccgggtacgccttcgacatcaccagcgatacgccgctgcgggccaccctgttgcgcgtctcaccggaggaacacgtcctcgtggtggtcatccaccacatcgccggcgacggctggtccatggggccgttggtgcgtgacctggtcaccgcctaccgggcccgaacgcggggcgacgccccggagtacaccccgcttcccgtgcagtacgccgactacgccctgtggcaacacgctgttgcgggcgacgaggacgccccggacggccggacggcgcgtcggctcgggtactggcgcgagatgctggccgggctgcccgaggagcacacgctgcccgccgaccggccccggcccgttcggtcctcgcaccggggcggccgggtacggttcgaactgcccgccggcgtgcaccggagtctgctggccgtggcgcgtgaccgtcgggccacgctgttcatggtggtgcaggctgcgctcgccggtctgttgtcccggctcggcgcgggcgacgacatccccatcggcaccccggtcgccgggcggggcgatgaagcgctggacgacgtcgtcgggtttttcgtcaataccctggtccttcggacgaatctcgcgggggatccgtccttcgccgacctggtggaccgggtcaggaccgccgacctcgacgcgttcgcgcaccaggacgtgcccttcgaacggctcgtggaggcgcttgcgccacggcgttccctcgcccgccacccgctgttccagatctggtacaccctcaccaacgccgaccaggacatcaccggccaggcactcaacgccctcccgggcctgaccggggacgagtacccgctgggggccagtgccgccaagttcgacctgtcgttcaccttcactgaacaccgcacccccgacggagacgccgccggcctgtccgttctgctcgactacagcagcgacctgtacgaccacggcactgccgccgcactgggccaccggctgaccggattcttcgcagcactggccgccgaccccaccgcccccctgggcaccgtcccgctcctcaccgacgacgagcgggaccgcatcctcggtgactggggcagcggtacgcacaccccgctgcccccgcgcagcgtggccgagcagatcgtccgccgggccgcgctggacccggacgccgtcgccgtcatcaccgcggaagaggaactctcgtaccgggaactggaaaggctcagcggtgagacggcgcggctgctggccgaccgggggatcggccgcgagagcctcgtcgccgtcgccctgccccgcacggccggcctggtcaccaccctgctcggcgtcctgcgcaccggcgccgcctacctcccgctcgacaccgggtaccccgccgagcgactcgcgcacgtgctctccgacgcccgtcccgacctcgtcctcacccacgccggcctcgccggacggctgccggccggcctcgcgccgaccgtcctcgtcgacgagccgcagccgcccgccgcagccgcccccgcggttcccacgtccccgtcgggcgaccacctcgcgtacgtcatccacacctccggctccaccggcaggcccaagggcgtcgcgatcgccgagtcctccctgcgcgccttcctcgcggacgcggtccggcgccacgacctgaccccgcacgaccggttgctcgcggtgaccaccgtcggcttcgacatcgccggcctcgaactgttcgccccgctcctcgccggtgccgcgatcgtgctggccgacgaggacgccgtacgcgaccccgcctcgatcacctccctgtgcgcacgccaccacgtcaccgtcgtccaggccacgcccagttggtggcgggccatgctcgacggagcaccggccgacgccgccgcccggctcgagcacgtacggatcctggtcggcggcgaaccgctgcccgccgacctggcccgtgtcctgaccgcaaccggcgccgccgtcaccaacgtgtacggacccaccgaagccaccatctgggccaccgccgccccactcaccgccggcgacgaccgcacacccggcatcggcacccccctggacaactggcgcgtccacatactcgacgcggccctcggacccgttcccccgggtgttccgggcgagatccacatcgccgggtccgggctcgcccgcggctatctgcgccgcccggacctcaccgccgaacgcttcgtcgccaacccgttcgcccccggcgagcggatgtaccgcaccggcgacctcggccggttccgcccggacggcacgctcgaacacctcggccgcgtggacgaccaggtcaaggtacggggcttccgcatcgaactcggcgacgtcgaggccgccctcgcccggcatcccgacgtggggcgcgccgccgccgccgtccgccccgaccaccgcggccagggccgccttgtcgcgtacgtcgtcccccgtcccggcacccggggaccggacgccggcgaactgcgcgagacggtacgcgaacttctgcctgactacatggtcccctccgcccaggtgactctcaccaccctgcctcacaccccgaacggcaaactcgaccgcgccgcgctgcccgcccccgtgttcggcacccctgccggacgcgcccccgccacccgcgaggaaaagatcctcgccgggctcttcgcggacatcctgggcctgcccgacgtgggagccgacagcggcttcttcgacctcggcggcgacagcgtgctgtccatccagctcgtgagccgcgcccggagggaaggactgcacatcaccgtacgagacgtgttcgagcacgggacggtcggcgcactcgccgccgcggcccttccggcaccggccgacgacgcggacgacaccgtccccggcacggacgtactgccttcgatcagcgacgacgaattcgaggagttcgagctggagctcggactcgagggggaggaagagcagtggtgaaccgccggtcgaaggtagtcgaggagatcctgcctgtctcggcgctccaggaaggactgctgttccacagctccttcgccgccgccgacggagtcgacgtgtacgcgggacagctcgcgttcgacctggtcggcgcggtggacaccggtcggctgcgggccgccgtcgaaagcctcgtggcgcggcacggcgtcctgcgctcaagctaccgtcaggcgcgctccggggagtgggtcgcggtcgtggcgcggcgcgtcgcgacgccatggcgcgccgtcgacgcccgcgacggtgccacggacgctgccgccgtggcccgggaggaacgctggcgcccgttcgacctgggccgggccccgctggctcggttcgtgctcgtacggaccgacgacgaccgtttccggttcgtgatcacgtaccaccacgtcatcctcgacggctggtcgctgccggtactgctgcgcgaactccttgccctgtacggaagcggcgccgacccgtcggtgctgccgcccgtccgcccctacggcgactttctccggtgggccgccgcgcgcgacgacgccgccgccgaaaccgcctggcgcgacgcgctcaccggcctggacgagccctccctggtcgcacccggcgcttcccccgacggcgtcgtgccggcctccgtccacgccgaactcgacaaggccggcaccgagaacctcgccgcctgggccaggcaccgcggcatcacccaggccaccgccgtccgcgccgcgtgggccctcgttctcggccagcacaccggccgcgacgacgtcgtgttcggcgtcaccgtctccggacggcccgccgaactcgccggcgccgagcacatggtcggactcttcatcaacaccgtccccctgcgcacggtcctcgaccccgccgacaccctcggcacgttcgccgctcgcctccaggccgaacagaccaccctcctcgaacaccagcacgtgcggctctccgacatccagcgctgggccggacacaaagaactcttcgacaccattgtcgtcttcgagaactaccccatcggccacagcggccccggctccatccgcaccgacgacttcaccgtcaccgccaccgaaggctccgacgccacccactaccccctcaccctcaccgccgtacccggcgaaaccctgcgcctcaagctcgaccaccgccccgacctcgtcgacaccaccaccgccaccgccctgctgcgccgcgtgacccgcgtcctggaaaccgccaccgacgacaccgggcacaccctcgcccgcctcgacctcctcgacgacgacgaacgccaccgcctgctgcgcggctggaacgacaccacgcgcgagcagccgcccacctactaccaccaggaattcgaggaacaggcgcggaggcggccccacgacacggcccttgtcttcaccagcacctcctggacgtacgaagaactcaacgaccgcgccaaccggctcgcccgcctgctcgtcgccgccggcgccggctccgacgacttcgtcgcgctcgccttcccccgttccgcggaatccgtcgtcgccatcctcgccgtactcaaagcgggcgccgcctacctgccgctcgacatggaccagcccgccgaacggctcaccggcatcctcgccgacgcacacccgaccgtcgtcctcacgaccaccaccgccaccccgctgccgcaccccggccgcaccctcgtcctcgacagccccaccaccgcccgcgccctcgctgcggcacccgcacacaacctcaccgacgccgaccgccgtaccccgctcaacgcccgcaacgccgcctacatcatccacacctccggctccaccggacgccccaagggcgtcgtcatcgaacaccgcagtctcgccaacctcttccacgaccatcggcgcgccctcatagaaccccatgccgccggaggatcacggctcaaggccggcctcaccgcctccctctccttcgacacctcctgggaaggtctgatctgcctggccgccggccacgaactgcaccttattgacgacgacacccgccgagacgccgaacgcgtcgccgaactcatcgaccggcagcgcatcgacgtcatcgacgtcaccccctccttcgcccagcaactcgtagagaccggaatcctcgacgagggccgccaccaccccgccgccttcatgctcggcggtgaaggcgtcgacgcgaaactctggaccaggctctccgacgtccccggcgtcacctcgtacaactactacggccccaccgaattcaccgtcgacgccctcgcctgcacggtcggcatcgcaccccgccccgtcatcggccaccccctcgacaacacggccgcctacatcctcgacggcttcctgcgtcccgtacccgaaggcgtcgccggcgagctctacctcgccggcacccagctcgcccgcggctacgccggccggcccggcctgacggccgaacgcttcgtggcctgccccttcggcgcgccgggcgaacgcatgtaccgcaccggcgacctcgtccggcgcagtcccggcggcgtggtcgaatacctcggacgcgtggacgatcagatcaaactccgcggcttccgcatcgaacccgccgagatcgagctcgccctggccggccaccccgccgtcgcccagaacgtcgtcctcctgcaccgctccgccaccggagaggctcgcctcgtggcgtacgtcgtccccggcacacccgtcgacccgcgggaactcaccgggcacctcgccgcccggctgcccgcgtacatggtgccctcggctttcgttctcctcgacaccctcccgctcacccccaacggcaaactggaccgcggcgccctgccggagcccgccttcggtaccgcgccccgccccgagcgcccccgcacacccgtcgaggagatcctctgcggcctgtacgccgacgtgctcgggcttccctcgttcggcgccgacgacgacttcttcgacgccggcgggcactcgctgctggccagcaaactcgtcagccgtatccgtacgaacctgaaaaccgaactcaacgtccgcgccctcttcgagcaccgcacggtctcctccctggccaccgccctccaccgggccgcgcaggccggccccgcgctcaccgccggaccgcgccccgcacggatcccgctgtcgtacgcccagcgccgcctgtggttcctcaaccggctcgaccgcgacagcgccgcgtacaacatgcccgtcgcactccgcctgcgtggccccctggacagcaccgccatgtgcgccgcactcaccgacgtcgccgaacgccacgaggcgctgcgcaccgtgttcgaggaggaccgggacggtgcccaccagatcgtgctgcccgcgaccggcctcggccctctgctcaccgtgaccggggccgacgggacgaccctgcgtgccctcatcaccgagttcgtacgcaggcccttcgacctggcggcggagatccccttccgcgccgcactgttccgcgtcggcgacgaggaacatgtactggtcgtcgtcctgcaccacatcgccggggacggctggtccatgggaccgctcgcacgcgacgtggccgaggcctaccgggcgcgggcggccgggagggcacccgactgggaaccgctgcccgtgcagtacgccgactacgcgctctggcagcgggaggtgctgggcgcggaggacgacgagaccggcgaactctccgcccaactcgcccactggcgcacccgcctcgcaggggcccccgcagaactcacgctgcccaccgaccgcccacgccccgctgtcgcctccaccgccggagaccgcgtcgaattcaccgtgcccgccggactccaccaggccctcgccgacctggcacgggcccacggcgcgacggtcttcatggtcgtccaggccgccctcgccgtcctgctgtcacgtctcggcgccggcgacgacatccccatcggcaccccggtcgccggccgcaccgacgaggccacggaggaactgatcgggttcttcgtcaacacgctggtgctgcgcaccgacgtgtccggcgacccgacgttcgccgaactcctcgcgcgggtgcgggccaccgacctcgacgcgtacgcacaccaggacgtgccattcgaacgtctggtcgaggtgttgaacccggagcggtcactggcacggcatccactgttccaggtcatgctgacgttcaacgtcccggacatggacggggtcggaagcgcgctggggaatctgggggaactggaggtctccggtgaggccatccggacggatcagaccaaggtggatctcgctttcacgtgcacggagatgtacgccgcggacggtgcggcctcgggaatgcgcggggtgctggaataccggcttgatgtgttcggtgcggtacaggcccgggaaacgacggagcggttggtgcgggtgttggagggtgtggtttctggtgggggtggggtgtctgtgtcgggggttgatgtgttgggtgtgggtgagcgggagaggttgttggggtggggtgtgggtgggccggtgcctgtggtgccgggtggtgggttggtggggttgttcgaggagcgggtgcgggccgacgcggacgcggtggccgtgcgtggcgcgggggtggtgtggagttatggggagttgaatgcgcgggtgaatgtggtggcgcggtggttggtgggtcggggtgtgggggcggagtgtggtgtgggtgtggtgatgggccgcggggtggatgtggtggtgatgttgctggcggtggcgaaggcgggtgggttttatgtgccggtggatccggagtggccggtggagcgggtggggtgggtgctggcggatgccggggtggggctggttgtggtgggggaggggttgtcgcatgtggtgggggattttcctgggggtgaggttttcgagttttcgcgggttgttcgtgagtcgtgtcttgtggagttggtggctgcggatggggttgaggttcggaatgtgacggatggtgagcgggcgtcgcgtctgttgccggggcatccgttgtatgtggtttatacgtcgggttcgacggggcggccgaagggtgttgtggtgacgcatgcttcggtgggtgggtatttggcgcgtggtcgggatgtgtatgcgggtgccgttggtggtgtggggtttgtgcattcgtcgcttgcgttcgatctgacggtgacggttctgttcacgcctttggtgtctggcggttgtgttgtgttgggtgagttggacgagtcggcgcagggggtgggtgcctcgttcgtgaaggtgactccgtcgcatctgggtttgctgggtgagctggagggtgtggtggcggggaacggcatgctgctggtggggggtgaggcgttgtcgggtggtgcgctgcgtgagtggcgtgagcgtaatccgggtgtggtggtggtgaatgcttatggtccgacggagctgacggtgaactgtgccgagttccttatcgcgcctggtgaggaggttccggatgggcctgtgccgatcgggcgtcctttcgcgggtcagcggatgtttgttctggatgcggcgctgcgggtggtgccggtcggtgtggtgggtgagttgtatgtggcgggtgtgggtctggcgcggggctatctcgggcgtgcgggtctgacggcggagcggttcgtggcctgccccttcggtgcgccgggtgagcgtatgtaccgtacgggggatctggtgcggtggcgggtggacggcgcgcttgagtttgttggtcgtgcggatgatcaggtgaaggtccgtggtttccgtgtggagttgggtgaggtggagggtgctgttgcggcgcatcctgatgtggtgcgtgcggttgttgtggtgcgtgaggaccggccgggtgatcaccggttggttgcgtatgtcaccggtgttgacacgggtggactgtcctctgcggtgatgcgtgccgttgctgagcgtctgcctgcgtacatggtgccgtcggcggtggtggttctggatgagatcccgttgacgccgaatgggaaggtggaccgggcggcgcttccggtgccgggggtggaggcgggcgcgggctaccgggcgcctgtttcgccgcgggaggaggtgttgtgtggtctgttcgcggaggtgctggggctggagcgggtgggggtggacgatgatttcttcgggttgggtggtcattctcttctggcgactcgtctgatttcgcgtgtccgtgcggtgttgggtgttgaggcgggtgtgcgggcgttgttcgaggcgccgacggtgagccgtttggagcggttgctgcgggagcggtcggctttgggggtgcgggtgcctctggtggcacgggagcggacgggtcgggagccgttgtcgttcgctcagcagcgtctgtggttccttgaggaactggaagggcccggtgctgcgtacaacattccgatggcgctgcgtctggccggtgttctggacgtcgaagcgctgcaccaggcgctcattgatgtcatcgcccgccacgaaagcctccgcaccctcatcgcgcaggatgcgggtactgcctggcagcacatcctgcccgttgacgaccctcgcacccgtcccggtctccctcttgtggacatcggtgccgacgcccttcaggagcggctcgacgaagccgccggccggcccttcgatctcgcggccgatctcccggtccgggccacagtcttccgcctcaccgacaacgaccacatcctcctggtcgtggcccatcacgtggccttcgacgcgatgtcccgtgtgccgttcatccggaacgtcaagcgcgccttcgaggcccgtacgaacggcgcggcccccgactggaggccgctgcccgtgcagtacgcggattatgcggcctggcagcgcgacgtactcggcacggaggacgacgagtcgagcgagctgtcggcccagctcgcctactggcgcacccaactagcctcactaccggccgagttggcgctcccgacggaccgggcccggcccgccgtcgcctcgtacgaaggcggcaaggtcgagttcaccgtccccgccggggtgtatgacggcctggtggctctcgcccgtgccgagggtgtcacggtcttcatggtcgtgcaggcggcgctggccgcgctcctctcccggctcggcgccggcgacgacatccccatcggcaccccgatcgccggccgcaccgaccaggccaccgaagatctcatcggcttcttcgtgaacaccctcgtcctgcgcaccgacgtgtccggcgacccgacgttcgccgaactcctcgcgcgcgtccgggccaccgacctcgacgcctacgcccaccaggacatccccttcgaacgactggtcgaagcggtcaaccccgagcgctccctcgcccgccaccccctcttccaggtcatgctgaccttcgacaacacgattgaccgtgaggtcacggagggcttcgcgggcctcggggtggaaggcctgccgctgggtgcgggagcggtcaaattcgatctgctcttcggtctctccgaggtgggcggcgagctgcgcggagccgtggagtaccgctgcgatctcttcgaccacccgacggtggcgcagctcgcggagcgcctggtgcgggtactggagcgcgtggcttccgacgcttcggtacgcacgggtgaactgccggtcgtcggcgaggcggagcgcgcccgtgtcctgacggagtggaatgacacgggcgtccccggtgtgccggaaacattcctggagttgttcgaggcgcaggtcgcggcccggggtgacgcgccggcggtcgtgtacgagggtgaggttctgtcgtaccgggaactcgacgcgcgggcgaaccgcctggccgggctgctggtggggcgcggtgcgggcccggagcatttcgtgggggtggcgctgccgcgtgggctggatctgatcgtggccctgctggccgtgctcaagtccggtgccgcgtacgttcccctggacccggagtacccggccgagcggctggtccacatggtcaccgacgccgcccccgtcgtggtcgtgacctccaccgacgtacgtactctgcggaccgttccccgggtcgagctggacgacgaggcgacccgcgccaccctggtcgcagcccccgccacagggcccgacgtgaagatgtccgcctcccaccccgcgtacgtgatctacacctccgggtccacgggccgccccaagggcgtcgtcatcagccacggcagcctggccaacttcctcgcctgggcgcgggaagacctgggtgccgagcggctccggcacgtcgtgttgtccacgtccctcagcttcgacgtctccgtggtcgaactcttcgccccgctgtcctgcggcggcaccgtcgagatcgtccggaatctgctggccctcgtcgaccgccccggccgatggtccgcgagcctggtcagcggcgtgccgtcggccttcgcgcagctgctggaagccggcctcgaccgggccgacgtgggcatgatcgccctggccggcgaggcgctgtccgctcgcgacgtgcgccgcgtccgcgctgtgctgcccggggcccgcgtggccaacttctacggcccgaccgaagccaccgtctacgccacggcctggtacggcgacacccccatggacgccgcggcccccatgggccggcccctgcgcaacacgtgtgtgtatgtgctggacgacgggctgcgcgtggtgccggtcggtgtggtgggtgagctgtatgtggcgggtgtgggtctggcgcggggctatctcgggcgtgtgggtctgacggcggagcggtttgtggcgtgtccgttcggtgcgcggggtgagcgtatgtatcgcacgggggatttggtgcggtggcgggtggacggcacgcttgagtttgttggtcgtgcggatgatcaggtgaaggtccgtggtttccgtgtggagttgggtgaggtggagggtgctgttgcggcgcatcctgatgtggtgcgtgcggttgttgtggtgcgtgaggaccggccgggtgatcaccggttggttgcgtatgtcaccggtgttgacacgggtggactgtcctctgcggtgatgcgtgccgttgctgagcgtctgcctgcgtacatggtgccgtcggcggtggtggttctggatgagatcccgttgacgccgaacgggaaggtggaccgggcgggtcttccggtgccggtggtgtcggtggcggggttctgtgcgccgtcgtcgccgcgggaggaggtgttgtgtggtctgttcgcggaggtgctgggtgttgagcgggtgggggtggacgatgggttcttcgatctgggcggggacagcattctgtcgattcagttggtggcgcgggctcgtcgggcgggtctggagttgtcggttcgggatgttttcgagggccgtacggtacgtgctctggcggctgtggtgcgtggttcggacgctggggcggttggtgtggtggggggtgctgagattgtgctgccgggtgtgggtgaggtggagcggtggccggtggtggagtggctggcggagcgtggtggggggtcgctgggtggtgtggttcggggtttcaatcagtctgttgtgcttgctgtgcctgctgggttggtgtgggaggagttgcgggtgttgttgggtgcggtgcgggatcggcatgaggcgtggcggttgcgggtgctggattccggggcgttgtgtgttgatggtgttgttccggatgacgggtcgtggattgtccggtgtgacctgagcggtatgggtgtggatggtcaggtggatgctgtgcgggctgcggctgtggaggcgcgtgcgtggctggatccgtcggtgggccgggtggtgcgggcggtgtggctggagcgtggtggtgatcgttcgggggtgttggtgctggtggcgcatcacctggtggtggacggtgtgtcgtggcgggtggtgctgggggatctggcggaggggtgggcgcaggtgcgttcgggtggccgtgtggagttgggtgtggtggggacgtcgttgcggggttgggcggcggcgttggcggagcagggccggcggggcgagcgtgcgggggaggtggagttgtggtcgcggatggttcggggtgcggatgttctggtggggtcgcgtgctgtggatggtgcggtggatgttttcggcggggtggtgtcggttgattcgcgggcgtcggtgtcggtgtcgcgtgcgttgctgacggaggtgccgtcggttctgggtgttggtgtgcaggaggtgttgctggcggcattcgggctggcggtcgcgcggtggcgcggccggggtgggccggttgtggtggatgttgaggggcacgggcgtaatgaggacgctgtgcggggtgctgatctgtctcgtactgtcggttggttcaccagtgtgtatccggtccgtgtgccggtggagtccgcttcgtgggacgaggtgcgtgcgggtggtccggtggtgggccgtgtggtgcgtgaggtgaaggagactctgcgttcgctgcctgaccagggtctgggttatggcatcctgcgctatctcgatcccgagcacggtcctgctctggcccggcatgccaccccgcagttcggtttcaactacctcggccgcttcaccaccggaaccgacgacaccggtgacgaggggatgacggactgggtccccgtgtcagggccgttcgcggtgggagccggccaggaccccgaactgcccgtggcgcacgcggtcgagttcaacgcgatcacgctggacaccccggagggcccgcgcctgggcgtgacatggtcgtggccgacgacgctgctgccggagtcccggatacgggagctggcccgctactgggacgaggccctggaagggctggtcgaacacgcccggcaccccgaagccggcggcctcacgccgtccgacgtgacgctggtggaagtgaaccaggtggagctcgaccgtctgcaggcgggggtcgccggtggtgcggaggagattctgccggtgtcggccctgcaagaggggctgctgttccacagcgcgttggcctctggtggggtggacgtgtatgtggggcagctggtgttcgatctggtcggtccggtggacgtcgaccggctgcgcgcggctgtcgaaggtctggtggcgcggcacggggtgctgcggtcgggataccgccaactgcggtcgggcgaatgggttgcggtcgtcgcacgacaggtggatctgccgtggcagtccatcgacgtgcgcgacggcggtatcgacgggttggtggaagaggagcgctggcgccggttcgacatgggccggggtccactggcgcgcttcgtgctcatccggacgcacgacgatcgtttccggttcgtcatcacgtaccaccacgtcgtcctcgacggctggtccgtcccggtgctgctgcgtgagctgctggccctgtacggcagctcgggggacgtatcggttctgccgggggtccgctcgtacggcgatttcctgcgatgggtcgccgcgcgagacgccgcagccgccgaaggcgcatggcggcgggcgctgacgggcctggaggagccgtcgctcgtcgcgccaggcgtttcccgagacggggtcgtcccggcggcgttccacggtgcggtcgacggcgacctctcgcagaagatcgtggcgtgggcgcgcgggcgtggtgtgacggttgcgtcggtggtacaggcggcgtgggccttggtgctggggcggttgatgggtcgggacgatgtggtgttcggggtgacggtgtcgggtcggcctgccgaggtggtgggtgtggaggacatggtcggtctgttcgtgaacaccattccgttgcgggcgcggctggatccggcggagtcgctgggtggtttcgtggagcggctgcagcgggagcagacggagctgctggagcatcagcatgtccggctggcggaagtccagcggtgggccgggcacaaggaactcttcgatgtcggaatggtcttcgacaactacccggtttcttctgaatccccggaagcggaattccagatctcacgaacaggcggatacaacggaacccactacgcactgaacctcgttgcttccatgcacggcctggagctggaactggaaatcggttatcggccggatgtgtttgatgcgggtcgggtgcgtgaggtgtggggatggttggtgcgggtgttggagggtgtggtttctggtgggggtggggtgtctgtgtcgggggttgatgtgttgggtgtgggtgagcgggagaggttgttggggtggggtgtgggtgggccggtgcctgtggtgccgggtggtgggttggtggggttgttcgaggagcgggtgcgggccgacgcggacgcggtggccgtgcgtggcgcgggggtggtgtggagttatggggagttgaatgcgcgggtgaatgtggtggcgcggtggttggtgggtcggggtgtgggggcggagtgtggtgtgggtgtggtgatgggccgcggggtggatgtggtggtgatgttgctggcggtggcgaaggcgggtgggttttatgtgccggtggatccggagtggccggtggagcgggtggggtgggtgctggcggatgccggggtggggctggttgtggtgggggaggggttgtcgcatgtggtgggggattttcctgggggtgaggttttcgagttttcgcgggttgttcgtgagtcgtgtcttgtggagttggtggctgcggatggggttgaggttcggaatgtgacggatggtgagcgggcgtcgcgtctgttgccggggcatccgttgtatgtggtttatacgtcgggttcgacggggcggccgaagggtgttgtggtgacgcatgcttcggtgggtgggtatttggcgcgtggtcgggatgtgtatgcgggtgccgttggtggtgtggggtttgtgcattcgtcgcttgcgttcgatctgacggtgacggttctgttcacgcctttggtgtctggcggttgtgttgtgttgggtgagttggacgagtcggcgcagggggtgggtgcctcgttcgtgaaggtgactccgtcgcatctgggtttgctgggtgagctggagggtgtggtggcggggaacggcatgctgctggtggggggtgaggcgttgtcgggtggtgcgctgcgtgagtggcgtgagcgtaatccgggtgtggtggtggtgaatgcttatggtccgacggagctgacggtgaactgtgccgagttccttatcgcgcctggtgaggaggttccggatgggcctgtgccgatcgggcgtcctttcgcgggtcagcggatgtttgttctggatgcggcgctgcgggtggtgccggtcggtgtggtgggtgagttgtatgtggcgggtgtgggtctggcgcggggctatctcgggcgtgtgggtctgacggcggagcggtttgtggcgtgtccgttcggtgtgccgggtgagcgtatgtatcgcacgggggatttggtgcggtggcgggtggacggcgcgcttgagttcgttggccgtgcggatgatcaggtgaaggtccgtggtttccgtgtggagttgggtgaggtggagggtgctgttgcggcgcatcctgatgtggtgcgtgcggttgttgtggtgcgtgaggaccggccgggtgatcaccggttggtggcttacgtgactgcgggtggtgttggtggggatggtcttcgttccgcgatctctggtttggtggctgagcgtctgcctgcgtacatggtgccgtcggcggtggtggttctggatgagatcccgttgacgccgaacgggaaggtggaccgggcggcgcttccggtgccggaggtggaggcgggcacgggctaccgggcgcctgtttcgccgcgggaggaggtgttgtgtggtctgttcgcggaggtgctgggtgttgagcgggtgggggtggacgatgacttcttcgagttgggtggtcattctcttctggcgactcgtctgatttcgcgtgtccgtgcggtgttgggtgttgaggcgggtgtgcgggcgttgttcgaggcgccgacggtgagccgtctggagcggttgctccgggagcggtcgggtttgggggtgcgggtgcctctggtggcacgggagcggacgggtcgggagccgttgtcgttcgctcagcagcgtctgtggttccttgaggaactcgaagggcccggtgctgcgtacaacattccgatggcgctgcgtctggccggtgttctggacgtcgaagcgctgcaccaggcgctcattgatgtcatcgcccgccatgaaagcctccgcaccctcatcgcgcaggatgcgggtactgcctggcagcacatcctgcccgttgacgaccctcgcacccgtcccggtctccctcttgtggacatcggtgccgacgcccttcaggagcggctcgacgaagccgccggccggcccttcgacctcgcggccgatctcccggtccgggccacagtcttccgcctcaccgacaacgaccacatcctcctgctggtcctgcaccacatcgccggcgacggctggtcgatgggcccgctcgcccgcgatctctccacggcgtacagcgcacgcgccgcaggagccgcctcggcctggcggcccctctccgtgcagtacgcggattatgcggcctggcagcgcgacgtactcggcacggaggacgacgagtcgagcgagctgtcggcccagctcgcctactggcgcacccaactagcgtcactcccagccgagttggcgctcccgacggaccgggcccggcccgccgtcgccacctaccggggcggacgcatcgagttcaccatccccgccgacgtccaccgcagcctcgccgacctcgcccgtgccgagggtgtcacggtcttcatggtcgtgcaggcggcgctggccgcgctcctctcccggctcggcgccggcgacgacatccccatcggcaccccgatcgccggccgcaccgaccaggccaccgaagatctcatcggcttcttcgtgaacaccctcgtcctgcgcaccgacgtctccggcgacccgacgttcgccgaactcctcgcgcgcgtccgggccaccgacctcgacgcctacgcccaccaggacatccccttcgaacgactggtcgaagcggtcaaccccgagcgctccctcgcccgccaccccctcttccaggtcatgctcgccttcaacaacgccgagacgagcaccccgctgcccatggccgaaggcctggctgcctcccggcaggacatcgaaccgggcgtggcgaaattcgatctggccctgtattgcaacgaatcccgcggtgagacgggcgaccaccagggcatcagaagtgtcttcgagtaccgccgcgacctgtgggacgaggacaccgtgcggcagctcgccgaccggttcctgcatgttctcgctgcttttgcggcagccccggagcaacgtgcgagcagcgtcgacgtgctccgggcgggcgagcgcgaccaactgctgcacgagtggaacgacacggctgccgctctccccccggcactgctgccccagctgttcgaggagcaggtgcggcgcaccccgcacgatgtcgctctcgtctcggggaacatccggctcacgtacgcggagctggacgcgcgcgcgaaccgcctggcccacttgctgctcgcccggggcgcggcccccgagacgttcgtcgcggtggccctgccccggaccgaagagctcctggtggccctgctggccgtacagaaaacaggtgccggacatctgccgctggatcccggcttcccggccgagcggctcagctacatgctggatgacgcccgccctgcggtggtcctcaccacggaggacatcagcgcccgcatacccggcggaagccatgtggtactcgactccgagcaggtgaccggcgagctccacgaccacccggccacgtcccccgccggccggggcaaccccgccggcccggcgtacgtgatctacacctccggatccaccggccagcccaagggcgtcgtcgtaccgtcggccgccctggtgaacttcctggccgacatggtgcccaggctcgggctccgcggtggcgaccgcctgctgtccgtgaccaccgtgggcttcgacatcgcggccctcgagctcttcgtcccgctactgagcggcgccaccgtcgtcctcgcggacggggagacggtccgcgacccggcgctggcccgccagacgtgcgaggaccacggcgtcaccatggtccaggcgacaccgagctggtggcacggcatgctcgccgacgcgggcgacagcctgcgcggcgtgcacgccgtcgtgggcggtgaggccctgagccccgggttgcgcgacgcgctgacacgaggcgcgcggtccgtcacgaacatgtacggcccgacggagacgaccatctggtccaccagcgccgggcaggccgccggggacagcgctcccccttcgatcggcacacccatcctcaacactcgcgtgtatgtgctcgacgctgctttgtgtgtcgtgccaccgggcgtcgcaggcgagctgtacatcgcgggcgacggcctcgcgcggggctatctcgggcgtgcgggtctgacggcggagcggttcgtggcctgccccttcggtgcgccgggtgagcgtatgtaccgtacgggggatctggtgcggtggcgggtggacggcgcgcttgagtttgttggtcgtgcggatgatcaggtgaaggtccgtggtttccgtgtggagttgggtgaggtggagggtgctgttgcggcgcatcctgatgtggtgcgtgcggttgttgtggtgcgtgaggaccggccgggtgatcaccggttggttgcgtatgtcaccggtgttgacacgggtggactgtcctctgcggtgatgcgtgccgttgctgagcgtctgcctgcgtacatggtgccgtcggcggtggtggttctggatgagatcccgttgacgccgaatgggaaggtggaccgggcggcgcttccggtgccgggggtggaggcgggcgcgggctaccgggcgcctgtttcgccgcgggaggaggtgttgtgtggtctgttcgcggaggtgctgggtgttgagcgggtgggggtggacgatgatttcttcgggttgggtggtcattctcttctggcgactcgtctgatttcgcgtgtccgtgcggtgttgggtgttgaggcgggtgtgcgggcgttgttcgaggcgccgacggtgagccgtttggagcggttgctgcgggagcggtcgggtttgggggtgcgggtgcctctggtggcacgggagcggacgggtcgggagccgttgtcgttcgctcagcagcgtctgtggttccttgaggaactggaagggcccggtgctgcgtacaacattccgatggcgctgcgtctggccggtgttctggacgtcgaagcgctgcaccaggcgctcattgatgtcatcgcccgccacgaaagcctccgcaccctcatcgcccgcgacagtgacggcacggcccggcagcaggtgctgcccgtcggtgaccccgccgcgcgaccggctcttccggtcgtacagaccgacgccgacaccctcgtcgcgaaactgaacgaggccgtcggccgccccttcgacctcacggccgagatgcccctgcgtgccaccgtcttccgggtggccgacgaggaccacgcgctgctgctggtgttccaccacatcgccggcgacggctggtcgacgggcctgctcgcccgcgacctgtccaccgcgtacgcagccaggctcgaaggccgggacccccaactgccacccctccccgtgcagtacgcggactacgcggcctggcagcgcgacgtactcggcacggaggacgacgagtcgagcgagctgtcggcccagctcgcctactggcgcacccaacttgccgacctcccagccgagttggccctcccggcggaccgggtccggcccgccagggcctcgtacgaaggaggccgggtcggcttcaccgtccccgccggggtcctccgcgacctcacgcgcctggcccgtgtcgagggtgtcacggtcttcatggtcgtgcaggcggcgctggccgcgctcctctcccggctcggcgccggcgacgacatccccatcggcaccccgatcgccggccgcaccgaccaggccaccgaagatctcatcggcttcttcgtgaacaccctcgtcctgcgcaccgacgtctccggcgacccgacgttcgccgaactcctcgcgcgcgtccgggccaccgacctcgacgcctacgcccaccaggacatccccttcgaacgactggtcgaagcggtcaaccccgagcgctccctcgcccgccaccccctcttccaggtcatgctcgccttcgacaacacggccgacggaggccccgtagaagacttccccggactgtccgcagccgggctgccgttgggtgcgggcgcggcgaagttcgatctgctcttcggtctctccgaggtgggcggcgagctgcgcggagccgtggagtaccgctgcgatctcttcgaccacccgacggccgcacggatcgcggagcgcctggtgcgggtgctggagcgggtcgccgccgacgcgtcggtacgcctgggcgagctgcccgtggtgagcgacgccgagcgggcctgcgtcctgacggagtggaacgacaccgccgtccccggcgtgacgggaacgctgtcggcgctgttcgaggcacgggccgcagcccggggcgacgcgccggcggtcgtgtacgagggtgaagaactgtcgtaccgtgaactgaacacacgcgccaaccgcctcgcccatgtcctggccgagcacggcgcaggccccgagcggttcgtcggtgtggccctgccccgcagtccggacctcgtagtggcactgctggcggtcgtgaaatcgggcgcggcctacgtaccgctcgaccccgagtacccggccgaccggctcgcgtacatggccggcgacgctgcccccgtggcggtcctgacccgcggggacgtcgaactccccgggtccgtcccgcggatcgggctggacgacacagagatccgcgcgacactcgccaccgcccccggcacgaaccccggcacgccggtgaccgaggcccaccccgcgtacatgatctacacctccggatccaccggccgccccaagggcgtcgtcgtctcccacggcgccatcgtcaaccggctcgcctggatgcaggcggagtaccgtctcgacgcgaccgatcgtgtcttgcagaagactccggccggtttcgacgtgtcggtctgggagttcttctggccgctgctcgagggcgcggtcctcgtgttcgcccggcccggcggccaccgggacgcggcgtatctggccggactcatcgagcgcgagcgcatcaccacggcacatttcgtgccctccatgctgcgcgtcttcctcgaagagcccggcgcggcactctgcaccggactgaggcgggtgatatgcagcggcgaggccctcggcacggacctggccgtggacttccgcgcgaaactgcccgtccccctgcacaatctgtacggcccgaccgaagcggctgtcgatgtcacccaccacgcgtatgagcccgccaccggcacggccacggtccccattggccgccccatctggaacatccgcacctacgtcctcgacgccgccctgcgtcctgtgccaccgggcgtgcccggcgagctgtatctggccggcgccggcctggcccgcggctaccacggccgcccggcactgacggcggagcggtttgtggcgtgtccgttcggtgtgccgggtgagcgtatgtatcgcacgggggatttggtgcggtggcgggtggacggcacgcttgagtttgttggtcgtgcggatgatcaggtgaaggtccgtggtttccgtgtggagttgggtgaggtggagggtgctgttgcggcgcatcctgatgtggtgcgtgcggttgttgtggtgcgtgaggaccggccgggtgatcaccggttggtggcttacgtgactgtgggtggtgttggtggggatggccttcgttccgcgatctctggtctggtggctgagcgtctgcctgcgtacatggtgccgtcggcggtggtggttctggatgagatcccgttgacgccgaacgggaaggtggaccgggcgggtcttccggtgccggtggtgtcggtggcggggttctgtgcgccgtcgtcgccgcgggaggaggtgttgtgtggtctgttcgcggaggtgctgggtgttgagcgggtgggggtggacgatgggttcttcgatctgggcggggacagcattctgtcgattcagttggtggcgcgggctcgtcgggcgggtctggagttgtcggttcgggatgttttcgagggccgtacggtacgtgctctggcggctgtggtgcgtggttcggacgctggggcggttggtgtggtggggggtgctgagattgtgctgccgggtgtgggtgaggtggagcggtggccggtggtggagtggctggcggagcgtggtggggggtcgctgggtggtgtggttcggggtttcaatcagtctgttgtgcttgctgtgcctgctgggttggtgtgggaggagttgcgggtgttgttgggtgcggtgcgggatcggcatgaggcgtggcggttgcgggtgctggattccggggcgttgtgtgttgatggtgttgttccggatgacgggtcgtggattgtccggtgtgacctgagcggtatgggtgtggatggtcaggtggatgctgtgcgggctgcggctgtggaggcgcgtgcgtggctggatccgtcggtgggccgggtggtgcgggcggtgtggctggagcgtggtggtgatcgttcgggggtgttggtgctggtggcgcatcacctggtggtggacggtgtgtcgtggcgggtggtgctgggggatctggcggaggggtgggcgcaggtgcgttcgggtggccgtgtggagttgggtgtggtggggacgtcgttgcggggttgggcggcggcgttggcggagcagggccggcggggcgagcgtgcgggggaggtggagttgtggtcgcggatggttcggggtgcggatgttctggtggggtcgcgtgctgtggatggtgcggtggatgttttcggcggggtggtgtcggttgattcgcgggcgtcggtgtcggtgtcgcgtgcgttgctgacggaggtgccgtcggttctgggtgttggtgtgcaggaggtgttgctggcggcattcgggctggcggtcgcgcggtggcgcggccggggtgggccggttgtggtggatgttgaggggcacgggcgtaatgaggacgctgtgcggggcgctgatctgtctcgtactgtcggttggttcaccagtgtgtatccggtccgtgtgccggtggagtccgcttcgtgggacgaggtgcgtgcgggcggtccggtggtgggccgtgtggtgcgtgaggtgaaggagactctgcgttcgctgcctgaccagggtctgggttatggcatcctgcgctatctcgatcccgagcacggtcctgctctggcccggcatgccaccccgcagttcggtttcaactacctcggccgcttcaccaccggaaccgacgaaaccaccacggccgacgccctcgaccgggcccccgcgtggagccttctcgcccgcagcgccgccggccaggaccccgaactgcccgtggcgcacgcggtcgagttcaacgcgatcacgctggacaccccggagggcccgcgcctgggcgtgacatggtcgtggccgacgacgctgctgccggagtcccggatacgggagctggcccgctactgggacgaagccctggaagggctggtcgaacacgcccggcaccccgaagccggcggcctcacgccgtccgacgtgggcctcgcggaactctcctttgctgagatcgaactgctcgaagacgactggaggacacagggatgacgcagcgcgcgatggaggacatacttcctctcactccgctgcaggagggactgctgttccacagtgtttacgacgagcagtccgtcgacgtgtacaccgtgcaggtggtcgtcgacctcgaggggcccgtcgaccccgaagcactgcgcgccgccgcggccgccctgctgcgtcggcacgccaacctgcgggcggccttccggtacgagcggctgcagcgccccgtgcagatcatcccgcgcgaggttgcggtgccgtgggagcacaccgacgtcgcgaagctcgagggcgccgagcagaaggccgagatcgaacgcctgctgcacgaccagcggtggcgccgcttcgatctgacggctccgcccctgctgcggttcctgctcgtgcgcacaggccacgaccggcaccgtttcgcgctgactttccatcacatcctcatggacggctggtcgatgcccgtcctgctgcgggaactcatcaccctctaccgcaccggcgacgagaccgccctgccctgggtccggccgtaccgggactacctggcctggatctcccgccgcgaccgggacgaggccgggcgggcctggtccaaggcactggccggggttgacgaggccaccctcgtcgccccgggtgccgaccgggccgccgagccgccgctgtggaccgagtcccggctcgaaccggacctggcggcgacgctcgccgcccgcgcccgcgagttcggcgtcaccctcaacaccctcgtccaggccgcctgggcgctcgtcctcggccgcctcaccggccgcgacgacgtcgtgttcggcgtgaccgtgtccggccggccgccggagctcgcaggtgtcgaggacatggtgggcctcttcatcaacaccgtgccgctgcgtgccgagctgctgccgcacgagagcctccgggacttcaccgtccgcctccagcgcgaacagatacagctcctcgaccaccagtacgaacgactggcggtcatccagcggctcgccggccggacagaactcttcgacacggtgatggtcttcgagaactaccccgtcgccgccgcatcctccgccggcgccgacggccccgcggccgaaccccgggtcgccgacgtccacgtacgcgacgccatgcactaccccctcggtctgctggtcctgcccggcccgccgctgcgcctgcgctttggccaccggccgagcgccctgcccgccgaacgcgtcacgacgatccgcgacagcctcgtgcgagccctggagctcatggccgaccagccggacctcgccgtcggcagggccgacatcctcggcgaggaggagaaacagcatctcctcaccggcctcaacgacacccaccgcgacgtgcccccgctcaccgtgcccggaatgatcgaggcccaggcggcccgcacccccggcaggccggcggtccatgcccgcgacggcgaactctcctacgccgaactcaacgcgcgcgccaaccggctcgcacgccacctcgccgcggccggcgtgggccccgagcagtacgtcaccctgctgctcccgctctccgcccgcatggtcgtggccgctctcgccgtgatgaagaccggcgccgcgtacgttcccgtggacccggagtatccggccgaccgcatcgcgtacatgcttggcgacatcggccccgcgctcgtcctcaccgactcccgctcggccgcggccatgcccgccggcccggcccgcgtcctcaccctcgacgacgacgccctcgacacgggcgttcgcgccctgcccgaacacgacctcggcaccgacggtatcgcgccgcttcccgaccagcccgcgtacgtcatctacacctcgggctccaccggccgccccaagggcgtcgtgatcctgcaccgttccgtcaccggctacctcctgcgcacgatcgaggaataccccgaagccgccggcaaggcattcgtgcactcgcccgtgtccttcgacctcaccgtcggagcgctgtacgcacccctggtgagcggtggctgcctgcgcctcggatcgttcaccgacgacaagatcctcgacctgggcgaggacagccccaccttcatgaaggccacccccagccatctcgccgtcctcgactccctccccgacgagatctcccccaccggggccatcaccctcggcggtgagcaactcctgagcgagaccctcgacccgtggcgcgcccgccaccccggcgtgaccgtcttcaacgtgtacggccccaccgagaccacgatcaactgcgccgaacaccgcatcgcccccggcaccaccctgcctcccggccccgtccccatcggccggcccctgtggaacacccgcctgtacgtcctcgacggcggcctgcgcgtcgtgcccacgggcgtcgccggcgagctgtacgtggccggcgcgggcctggcccgcggctatctcggacgccccggcctgacggccgaacgcttcgtggcctgccccttcggcgcaccgggcgaacgcatgtaccgcaccggtgacctggtgcggtggagaaccgacggcacgctggagttcgtcggccgcgtcgacgaccaggtcaaggtacgcggcttccgcatcgagctcggtgaggtcgaggccaccgtcgccgccacccccggtgtggcgcgcgcgatcgtcgctgtccgcgaggaccgccccggcgaccagcggctcgtggcgtacgtgacacctgccgacgtcgaccccaccggcggcctgccgtcggcggtgaccgcccatgccgccgcccgcctgcccgcgtacatggtgccgtccgccgtcgtggtactgcacgaggtacccctcacccccaacggcaagatcaacagggcggccctgcccgcgcccgaggccgtctccggcgccggcttccgtgcccccggcacggcccgtgaggaagttctgtgcggcctgttcgccgaagtcctcggcctcgaacgggtcggcacggccgacgacttcttcgaactcggcggccactcgctgctcgccacccgcctggtgtcccgcgtccgttcggtcctcggcgtcgaactcggcgtccgcgccctcttcgacgcccctacccccggccgcctcgaccggctcctgggggaacgctccggcgcccccgtccgcgcccccctgaccgcgcgggaacgcaccgggcgggaccccctgtcgtacgcccagcagcgcctgtggttcctccacgaactcgagggccacggcgccacatacaacatccctctcgcgctgcgcctcaccggtcctctcgacgtgaccgccctcgaagccgccctgacggatgtcgtcgcccgccacgagagcctgcgcacactcatcgcccgggacggcaccggcaccgcgtggcagcacatcctgcccaccggcgaccctcgcgcccgaatcacccttgaggccgtacccctgcacagggacgaactggccgggcgcctcgccgaagcggcccgccaccccttcgacctcaccgccgagatccccgtccgcgccaccgtcttccgcaccgagcgcgacgaccacaccctgctcgtcgtcacccaccacatcgcaagcgaccgttggtcccgcgagccgttcctccgtgacctgtccgccgcctacgcagcccggcgcgcacactccgcgccggaactgcccccgctgtccgtgcagtacgctgactacgccgcctggcagcgcgacgtactcggcaccgaggacgacgggacgagcgagatggccggccagctcgcccactggcggggcagactcgccggcctcccgcagggcctggacctgcccaccgaccgcccccgacgccccgacgtcggccgccgcggcggccggtgccggctggagatccccgccgcgctgcaccgcgacatcgtcaccctcgcccgcgtcaccagtaccaccgtgttcatggtggtccaggcggccctcgccggtctgctgtcgcggctgggcgcgggcaccgacatccccatcggcacgccgatcgcgggccgcaccgacgaggccaccgagcacctcatcgggttcttcgtgaacaccctcgtcctgcgcaccgacgtctccggcgatccgacgttcgccgaactcctcgcgcgcgtgcgggccaccgacctcgacgcgtacgcacaccaggacgtgcccttcgaacgcctggtggaggtcctcaacccggaacgctcactgctgcgccaccccctcttccagatactgctcgccttccagaacaccgaggaccgcagcatctccgaccgccccgggaccctgctgcccgacctgcaggtcaccgaacagcccctcgacgccgggacggccaagttcgacctcgcgttcgcgttcaccgagcggcccccggagaagggcgaaccctccggcatcaccggaatcgtcgaataccacgccgacctgtacgacgagggcaccgtccggcagatcgcggactgcttcgtgcagttcctcgacgcggccgtccacgccccgggcacccgcgtcgacgcggtcgggctgctcccggaacacaccctccacaaactgctgacccgcagccgcggcactgtcaccggcctgccgcccgccaccctgcccgagctgttcgaggcccgggtggcggcgcaccccggtcacatcgcggtcgaggtcgccggccgccggcccgccactacgacgtacgacgcactgaaccggcgggccaaccggctcgcccggctgctcaccgaccggggcgtacggcccgaacagcgcgtggcgatcgccctgccccgctccgcggacctggtgacggcctggctcgggatcctcaaggccggcgccgtgtgcgtgcccgtcgaccccgcctaccccgacgaccgcatcgcccacatggccgccgacgcggccccggcgctcctcatcgcctccgcagccacccgcgaccgcatgctccccaccggcatccccgtactggacctcgacgacccggccgtcaccgccgcactcgccgccgcgcccgacggcaatccgcgcggcacgggactgctgcccgcccatcccgcctacgtcatctacacctccggctccaccggcacacccaagggcgtcgtcgtcacccacgaaggcatcccggcgctggccgccacccagcaggaggcactgcgcgcgggccccggagaccgggtcctgcaactggtgtcgaccagcttcgacgcctccgtctgggacctgtgctccgcgctgctgtcgggcgcgaccctcgtcctcgccccggacgcggacctcttcggtgacgaactcgccgccgcgctcaccgcacaccgcatcacgcacgtcaccctgcccccggccgcgctggccgctgtcccggcaggcgcggcacccccccggctgacggtcaccgtcaccggcgacgtgtgcggaccccaactcgtcgaccgctgggccggtggcgaacggcggatcctcaacggctacgggcccaccgaggtcaccgtcggcgccacctacgccgtgtgcgaacggaccggtgacggcgcgcccgtgccgatcggcgcaccctggcccgaccagcgtgtgtacgtcctcgaacaccggctccggcccgtacccgccggctgcgtcggcgagatctacgtcgccggggccggactggcccgcggctatctgggccgccccggacagaccgccgaacgcttcgtcgccgaccccttcggcgcccccggcgagcgcatgtaccgcaccggtgacctggcccgccgccgcagcgacggccacctgctgttcgagggacgcgccgacacgcaggtcaaaatccgcggcttccgcgtcgaactcgccgagatcgaggcggccctcgcatcgcaccccggcgtcgaggacgcggtggtcaccgtgtacgacgacgggctcggcgaccagcggctcgtcgcgtacgtcaccggcggccccggcacaccgtcggccgccgcgctgcgcgcccacctggcgtcccggctgccccggcacatggtgcccggtgacgtcctcaccctggacgccctgccgctcaccgccaacggcaaggtggaccgcacggcgctgcccggccccggcacccagaccgccgcccccgggcgcgcaccccagtcgccgcaggaacgggtgctgtgcgccttgttcgccgacgtgctcggccgggagaccgtcggcgtggacgaggggttcttcgacctgggcggtcactcgctgctcgccactcgcctcgcggcccgggtccgcgcggcgctgggcgtggagatctccgtgcgcaccctgttcgaggcgccgacccctgccctgctcgcgtcggcgtgcacggcggacgccgcggcgtacgacccgttcgagacggtgctgccgctgcggcgcacgggcagccggccaccgctgttctgcgtccacgccggaatgggcctgagctgggcgtacgccggcctgctcagccatctggacgcggacgtgccggtttacggactgcaggcccggaggctcaccgcgcccggcgggctgcccgggagcgtcgaggagatggctgaggactacgccggtgagatccggcgcctgtgcccggatgggccgtaccggctgctcggctggtccttcggcggcacggtcgcccacgccgtcgcgacccgcctgcaacagcagggccacaccgtcgaactcctcgccgtcctcgacgcctaccccgtcaccggggcccggcccgacgccgaggtggacgaacagcgcatcgtcgccgactacctcgcccagctcggttcccccgtcgcccccgagcgcctcgagggcgacgcgtggctcccggagttcctcgagttcgtacggcgcaccgacgggcccgcgagggacttcgacgccgggcggatcctcgcgatgaaggacgtcttcctcaacaacgcccggctcacccgccgtttcacacccggcgtgttcaccggcgacatggtgttcttcgcctccgcacggcccggttccgagcaggccgccgaacgcgtcggcctgtggcacccccacgtcaccggcgacctcgacctgcacctgatcgactgcgcacacgaggagatgaccgatccagccgcactcacccggatcggccccgtgctcgccgcacggctgggcgccggcacctgacccccaggaccccacacgggacaccggacacgggggcgcccccctgtccgtacacgaaaggaaacataccgccatggccaaccccttcgagaacaacgacggcagctacctcgtactggtcaacgacgagggccagtactccctttggcccgcgttcgccgatgtcccggcgggctggaccgtcaccttcggcgagagcagtcggcaggaatgcctcgaccacatcaacgagaactggaccgatatgcgccccaagagcctcatccggcagatggagaacgaccggacgaccgcggcctgacccgcagccggacagcggagacggaaggagggccgacatgagggcgacatccaggatgatccaggtcaacggcgcccggatcgcctgctccgacagcggctgcggtgacccggtgctgatgatcgccggcaccggcagtaccggccgggtgtgggacgcctaccaggtgcctgacctgcacgcggccggattccgcaccatcacgttcaccaatcgcggcgtaccgccgtccgacgagtgcgagcggggcttcaccctcgccgacctcgccgccgacaccgccgcgctgatcgaacaggtggcgggcggaccctgccgcgtcgtgggcacgtccctgggcgcccaggtggcccaggaagtcgccctggcccgcccggacctggtgacccaggcggtgttcatggccacccggggtcgcaccgacgcgatgcgggccgccgccaccagggcggccgccgccctgtacgacagcggcgtcgaactgccccccgcctacgcggcggctgtccgcgcgctgcagaacctctccccccacaccctccgggaccgccatcaggtcgaggactggctcccactcttcgagtacgccgaacgggacgggccgggggtccgtgcgcagttggaactcggcctgctgcccgaccgcctcgcggactaccgggacatcaccgtcccctgcctggtcatcgcgttcgaggacgacgtcgtcaccccgccgtacctgggccgcgaagtggccgacgcgatccccggcgcccgcttcgagaccgttccccgctgcggccactacggctacctcgaggatgcgagcgcggtcaacaagattcttcgcgatttcttccgaacgagctgaaaggcacgacgaccttgtccagtaccggcagagaggggcccgtcgtgaccggcgaaacccgcaccaccacctacctccccggcatgaccgtgcacgactaccacgtgaccgtcaaggaacagcacccggcgctcttcgagctcctggaccccgcacgcctcgtcgccgtcacggacgagccttgggtcacggagggaaacgagttcgacgacgaccacgccggccgcggcgtctcctaccgctgtgcccagcagcacggcgaagcccgccgcaccggcattgagacgattctcggcatgttcgccggccccggcgggctgcgcgacatgggccgtgtcctcgatgtactcggaggcgaaggcctgctcagccgcgtgtggcggcaactggccggcgccggcgacggggactccgtgccactggtcaccggagacctcagcggccacatggtggccgcagccctccggtccggcctgcccgccgtacgccagccggccgaccgcatgctgcagcgagaccactgcctggacggcgtgctcttcgcgtacggcactcaccacgtcgaccgctctgtacgcccccgcatgctgacagaggcctcccgggtcctggcccctggaggccgcgtcgtcctccacgacttcgcggagggatcccccgaagaacgctggttccgcgaagtcgtccacccccgctccctcgcgggccacgcgtacgaccacttcaccgcccacgagatgaccggctacctcgccgacgcgggcttcaccgacatcaccgtcggccccgtgtacgacccgatgaccctgaccggggagaccgacgagagcgcactggctcggctcgtctcctacatgacctcgatgtacggcatcctgcccgacggcgaccggagcaacgagcggacggaagccgccctccgcgacatcttccgtttctcggccggcgacctccccgaggacgtcccccgcgacgaggcggtcctggaacttaccgtccgtccgcacggcaatgccttccgggccgagctcccccggatagccctcgtcgcccacggacgcaaaccatgacagcgcaggacacccggacgaccgggagtgacggtggcggccggggcgccacgtaccacgagagcccgacctacggggagctgctgcgcctggaggacctgctgaacgtcgcgcacctgcgcgacgcggccgccccggtcctcttccttgccacgcaccagtcggcggagatctggttcggcatcgtgctgcgccacctggaggaaatccgcgcggccctcacggacgacgacccggacacggcactgcatctgctgccgcgactgccggagatcttcgaactgctcgtccgccacttcgacatgctggccacgctgagtacggaggaattcggcaagatccgcgcggggctgggcacggcgagcggcttccagtcggcgcagtaccgggagatcgagttcctgtgcggtctgcgcgaccaccgccacatctccacaccgggcttcacggaaaccgaacgtcggcgactgcgggaacgggcccgccagccctccgtggcggaggcctacgacgccttccggacccgatgcgccaacgggaaggacgcggaacggatcggggaagcgctcctgaggttcgacgaacgggtcaccgtctggcgcgcccgccacgcggccctggcggaacgcttcctgggcccccttgaagggacggccggcaccgccggagccgactacttgtggcgggtcacccggcacaggctcttccccccggaggcgtggggcgccggctgacggcaccgccccggccccggggacgggacaggccggttcccgcaccccggccccgggggcgggaaacggccttgccgtgccgtcagaaggccgtcaaccggtcccacacgagggtccgagcccttcgtcgagcaagcgtcgccactctgacgttcggtctgtcgacgctcataccggcgggcaccgtcacggccaccggcaccctggtcaggaagctggtgaaggaggcgggcgaggaagcggccggttgcatcatgtccacgctgaccgagcccgcagtgcaggcgatcgagaacgtcgccgccgacctggcggttcaggccgcagccaacgcggtcgggctgcagaacgggatcgacaccggtcaggccgtccacgccggcaaggaggggttccaggacggagtcgcgggtgcgaaggaaggactgcgactcgcctcggtggacggcggtccgccgccgggatcgacgggccggctgatgggcgacctcaaggcgaccaagggctttggcgaccatcgggcgccaagacgtgcaagaacgaccccgtggacgtcgccaccggtgagatgctgctcccgcagaccgtcctggggctccccggcgtcctgcagctggtcctggggcggactcatccgtgctcggctgccgaccgtcggcaacctcgacgccgccgtgaactcatcaggttcgccagtgcggttcacctgcgacgccgatggacgcgtcacctcctggaccgactgcaacgacgccaccttccgtacgtctacgaccaggccggccgggtggtgcggaccgaaggccccgacggcatcctctcctcgtcctgtgcctatggagagccggaacccgacaccgggccgcgcacgacgcgcaagggcggccggtgatccgtcggagctcaacgctccgtggccgcacagcggtctggcacttcacctgggacgctcaggaccggctcgccgaggccgccgaccactgctgggactgcgcgcggttcccgcgcctgagagggggcgcgctgaccttggtcagaagccttgcgcgatcacgagcgtcacgttggcgggcgacttgctccgccgagttgaagccgtacgaagtgccgactggatcgatgcggccagccatcctcagggttgccctgacagagtttggtggacacgaaccggaacaacccggaccgccagatgtggttgagttttccgggacagttgatccacacaccgtcccgccgctcagtcccgttcggaccatgagcctcaccgaaggaccccacctgcacatgagcacccccgacactcgtcccccgcggtggcctttacctcccgccccgcccgcccatgaccccgtcctcttcgcgcgggcgatgcgggacatgcgcctgacgtggcgtgcccgcgggatcctggccgaactctccgtcggctacggccccgggcaggaccccacgatcagcgagctggtcgcgctcaaccgcgacgagcgtctggctgcagagggccgcgaggccttccgcacggcggtccgtgagctgcgcggcctcggctacctcactccggacgccaccacggcctccggcgtcggggagcgtctgatcgtcgatctcgccccggccgcggaagcctggctgatcccgcagcaacccggtttcgggttctacgtggacgggagctgaccgtccgactctctgccgggcgtggccgaacgccgtcctcgtgtgacggggacggcccgcctatcctgcgggcatggcccaacccattgaactcgtcatattcgactgcgacggcgtactcgtcgacagcgaacgcatcgcggtgcgcgtggacgcactcgtcctggccgagctggggtggaatctcaccgaagccgagatcgtcgaccggttcatgggcctgtcgagccggtcgatgacgcggcagatcgaggaccacctcgggcgccgtctgccggccgactgggaggaagagttcaagcccctctacgacgaggcgctcgccgccgaactcacgccggtcgagggcatcgtcgacgccctcgacgcgctcacgcatctccccacctgtgtggcatccagcgggagccacgacaagatgcgtttcacgctggggatgaccggtctccgcccgcgcttcgaaggccgcattttcagtgccaccgaggtcgagcacggcaagccggccccggatctgttcctacacgccgcgcggaagatgggggtcgtgcccgaggcgtgcgccgtggtcgaggacagtcagtacggtcttcaggcagcccgggccgcgggcatgcgagccttcgcctacgccgggggactgactcccgcggaccgtctcgaaggccccggcaccgtcgtcttcgacgacatgcgcagactgcccggcctcctcgcggatcactgaccgccgcctggatcactccactccatcggccactgt

SEQ ID NO: 2 - DNA, 390 bp, Streptomyces roseosporus
cccctccccaccacctgcccagtgtgacgtttgcgcagatgagaacgtgcgtaaacgccgcatacgcaaagatcgtccctgccgggacccattgacgttcgcaggggcgtggaacatactggcgatcaagtcgcacaggaaccaacaggcacaccaaccacaggcgttacagggggggttggtgtttcgtccatatcaagtggtttggtccgccgaagcggttggacctcacatgacggcaacagggcattcgcacatgcctgatgacgggacggcacacctcacgcagcggcgaccggtcgcaagccggacgcggaatgactccctgccttacaggtatgcgagcgcggatgcgtcgttcgaccggagtcaggagggggagtgcctgcc

SEQ ID NO: 3 - DNA, 7140 bp, Streptomyces roseosporus
atgacgcagcgcgcgatggaggacatacttcctctcactccgctgcaggagggactgctgttccacagtgtttacgacgagcagtccgtcgacgtgtacaccgtgcaggtggtcgtcgacctcgaggggcccgtcgaccccgaagcactgcgcgccgccgcggccgccctgctgcgtcggcacgccaacctgcgggcggccttccggtacgagcggctgcagcgccccgtgcagatcatcccgcgcgaggttgcggtgccgtgggagcacaccgacgtcgcgaagctcgagggcgccgagcagaaggccgagatcgaacgcctgctgcacgaccagcggtggcgccgcttcgatctgacggctccgcccctgctgcggttcctgctcgtgcgcacaggccacgaccggcaccgtttcgcgctgactttccatcacatcctcatggacggctggtcgatgcccgtcctgctgcgggaactcatcaccctctaccgcaccggcgacgagaccgccctgccctgggtccggccgtaccgggactacctggcctggatctcccgccgcgaccgggacgaggccgggcgggcctggtccaaggcactggccggggttgacgaggccaccctcgtcgccccgggtgccgaccgggccgccgagccgccgctgtggaccgagtcccggctcgaaccggacctggcggcgacgctcgccgcccgcgcccgcgagttcggcgtcaccctcaacaccctcgtccaggccgcctgggcgctcgtcctcggccgcctcaccggccgcgacgacgtcgtgttcggcgtgaccgtgtccggccggccgccggagctcgcaggtgtcgaggacatggtgggcctcttcatcaacaccgtgccgctgcgtgccgagctgctgccgcacgagagcctccgggacttcaccgtccgcctccagcgcgaacagatacagctcctcgaccaccagtacgaacgactggcggtcatccagcggctcgccggccggacagaactcttcgacacggtgatggtcttcgagaactaccccgtcgccgccgcatcctccgccggcgccgacggccccgcggccgaaccccgggtcgccgacgtccacgtacgcgacgccatgcactaccccctcggtctgctggtcctgcccggcccgccgctgcgcctgcgctttggccaccggccgagcgccctgcccgccgaacgcgtcacgacgatccgcgacagcctcgtgcgagccctggagctcatggccgaccagccggacctcgccgtcggcagggccgacatcctcggcgaggaggagaaacagcatctcctcaccggcctcaacgacacccaccgcgacgtgcccccgctcaccgtgcccggaatgatcgaggcccaggcggcccgcacccccggcaggccggcggtccatgcccgcgacggcgaactctcctacgccgaactcaacgcgcgcgccaaccggctcgcacgccacctcgccgcggccggcgtgggccccgagcagtacgtcaccctgctgctcccgctctccgcccgcatggtcgtggccgctctcgccgtgatgaagaccggcgccgcgtacgttcccgtggacccggagtatccggccgaccgcatcgcgtacatgcttggcgacatcggccccgcgctcgtcctcaccgactcccgctcggccgcggccatgcccgccggcccggcccgcgtcctcaccctcgacgacgacgccctcgacacgggcgttcgcgccctgcccgaacacgacctcggcaccgacggtatcgcgccgcttcccgaccagcccgcgtacgtcatctacacctcgggctccaccggccgccccaagggcgtcgtgatcctgcaccgttccgtcaccggctacctcctgcgcacgatcgaggaataccccgaagccgccggcaaggcattcgtgcactcgcccgtgtccttcgacctcaccgtcggagcgctgtacgcacccctggtgagcggtggctgcctgcgcctcggatcgttcaccgacgacaagatcctcgacctgggcgaggacagccccaccttcatgaaggccacccccagccatctcgccgtcctcgactccctccccgacgagatctcccccaccggggccatcaccctcggcggtgagcaactcctgagcgagaccctcgacccgtggcgcgcccgccaccccggcgtgaccgtcttcaacgtgtacggccccaccgagaccacgatcaactgcgccgaacaccgcatcgcccccggcaccaccctgcctcccggccccgtccccatcggccggcccctgtggaacacccgcctgtacgtcctcgacggcggcctgcgcgtcgtgcccacgggcgtcgccggcgagctgtacgtggccggcgcgggcctggcccgcggctatctcggacgccccggcctgacggccgaacgcttcgtggcctgccccttcggcgcaccgggcgaacgcatgtaccgcaccggtgacctggtgcggtggagaaccgacggcacgctggagttcgtcggccgcgtcgacgaccaggtcaaggtacgcggcttccgcatcgagctcggtgaggtcgaggccaccgtcgccgccacccccggtgtggcgcgcgcgatcgtcgctgtccgcgaggaccgccccggcgaccagcggctcgtggcgtacgtgacacctgccgacgtcgaccccaccggcggcctgccgtcggcggtgaccgcccatgccgccgcccgcctgcccgcgtacatggtgccgtccgccgtcgtggtactgcacgaggtacccctcacccccaacggcaagatcaacagggcggccctgcccgcgcccgaggccgtctccggcgccggcttccgtgcccccggcacggcccgtgaggaagttctgtgcggcctgttcgccgaagtcctcggcctcgaacgggtcggcacggccgacgacttcttcgaactcggcggccactcgctgctcgccacccgcctggtgtcccgcgtccgttcggtcctcggcgtcgaactcggcgtccgcgccctcttcgacgcccctacccccggccgcctcgaccggctcctgggggaacgctccggcgcccccgtccgcgcccccctgaccgcgcgggaacgcaccgggcgggaccccctgtcgtacgcccagcagcgcctgtggttcctccacgaactcgagggccacggcgccacatacaacatccctctcgcgctgcgcctcaccggtcctctcgacgtgaccgccctcgaagccgccctgacggatgtcgtcgcccgccacgagagcctgcgcacactcatcgcccgggacggcaccggcaccgcgtggcagcacatcctgcccaccggcgaccctcgcgcccgaatcacccttgaggccgtacccctgcacagggacgaactggccgggcgcctcgccgaagcggcccgccaccccttcgacctcaccgccgagatccccgtccgcgccaccgtcttccgcaccgagcgcgacgaccacaccctgctcgtcgtcacccaccacatcgcaagcgaccgttggtcccgcgagccgttcctccgtgacctgtccgccgcctacgcagcccggcgcgcacactccgcgccggaactgcccccgctgtccgtgcagtacgctgactacgccgcctggcagcgcgacgtactcggcaccgaggacgacgggacgagcgagatggccggccagctcgcccactggcggggcagactcgccggcctcccgcagggcctggacctgcccaccgaccgcccccgacgccccgacgtcggccgccgcggcggccggtgccggctggagatccccgccgcgctgcaccgcgacatcgtcaccctcgcccgcgtcaccagtaccaccgtgttcatggtggtccaggcggccctcgccggtctgctgtcgcggctgggcgcgggcaccgacatccccatcggcacgccgatcgcgggccgcaccgacgaggccaccgagcacctcatcgggttcttcgtgaacaccctcgtcctgcgcaccgacgtctccggcgatccgacgttcgccgaactcctcgcgcgcgtgcgggccaccgacctcgacgcgtacgcacaccaggacgtgcccttcgaacgcctggtggaggtcctcaacccggaacgctcactgctgcgccaccccctcttccagatactgctcgccttccagaacaccgaggaccgcagcatctccgaccgccccgggaccctgctgcccgacctgcaggtcaccgaacagcccctcgacgccgggacggccaagttcgacctcgcgttcgcgttcaccgagcggcccccggagaagggcgaaccctccggcatcaccggaatcgtcgaataccacgccgacctgtacgacgagggcaccgtccggcagatcgcggactgcttcgtgcagttcctcgacgcggccgtccacgccccgggcacccgcgtcgacgcggtcgggctgctcccggaacacaccctccacaaactgctgacccgcagccgcggcactgtcaccggcctgccgcccgccaccctgcccgagctgttcgaggcccgggtggcggcgcaccccggtcacatcgcggtcgaggtcgccggccgccggcccgccactacgacgtacgacgcactgaaccggcgggccaaccggctcgcccggctgctcaccgaccggggcgtacggcccgaacagcgcgtggcgatcgccctgccccgctccgcggacctggtgacggcctggctcgggatcctcaaggccggcgccgtgtgcgtgcccgtcgaccccgcctaccccgacgaccgcatcgcccacatggccgccgacgcggccccggcgctcctcatcgcctccgcagccacccgcgaccgcatgctccccaccggcatccccgtactggacctcgacgacccggccgtcaccgccgcactcgccgccgcgcccgacggcaatccgcgcggcacgggactgctgcccgcccatcccgcctacgtcatctacacctccggctccaccggcacacccaagggcgtcgtcgtcacccacgaaggcatcccggcgctggccgccacccagcaggaggcactgcgcgcgggccccggagaccgggtcctgcaactggtgtcgaccagcttcgacgcctccgtctgggacctgtgctccgcgctgctgtcgggcgcgaccctcgtcctcgccccggacgcggacctcttcggtgacgaactcgccgccgcgctcaccgcacaccgcatcacgcacgtcaccctgcccccggccgcgctggccgctgtcccggcaggcgcggcacccccccggctgacggtcaccgtcaccggcgacgtgtgcggaccccaactcgtcgaccgctgggccggtggcgaacggcggatcctcaacggctacgggcccaccgaggtcaccgtcggcgccacctacgccgtgtgcgaacggaccggtgacggcgcgcccgtgccgatcggcgcaccctggcccgaccagcgtgtgtacgtcctcgaacaccggctccggcccgtacccgccggctgcgtcggcgagatctacgtcgccggggccggactggcccgcggctatctgggccgccccggacagaccgccgaacgcttcgtcgccgaccccttcggcgcccccggcgagcgcatgtaccgcaccggtgacctggcccgccgccgcagcgacggccacctgctgttcgagggacgcgccgacacgcaggtcaaaatccgcggcttccgcgtcgaactcgccgagatcgaggcggccctcgcatcgcaccccggcgtcgaggacgcggtggtcaccgtgtacgacgacgggctcggcgaccagcggctcgtcgcgtacgtcaccggcggccccggcacaccgtcggccgccgcgctgcgcgcccacctggcgtcccggctgccccggcacatggtgcccggtgacgtcctcaccctggacgccctgccgctcaccgccaacggcaaggtggaccgcacggcgctgcccggccccggcacccagaccgccgcccccgggcgcgcaccccagtcgccgcaggaacgggtgctgtgcgccttgttcgccgacgtgctcggccgggagaccgtcggcgtggacgaggggttcttcgacctgggcggtcactcgctgctcgccactcgcctcgcggcccgggtccgcgcggcgctgggcgtggagatctccgtgcgcaccctgttcgaggcgccgacccctgccctgctcgcgtcggcgtgcacggcggacgccgcggcgtacgacccgttcgagacggtgctgccgctgcggcgcacgggcagccggccaccgctgttctgcgtccacgccggaatgggcctgagctgggcgtacgccggcctgctcagccatctggacgcggacgtgccggtttacggactgcaggcccggaggctcaccgcgcccggcgggctgcccgggagcgtcgaggagatggctgaggactacgccggtgagatccggcgcctgtgcccggatgggccgtaccggctgctcggctggtccttcggcggcacggtcgcccacgccgtcgcgacccgcctgcaacagcagggccacaccgtcgaactcctcgccgtcctcgacgcctaccccgtcaccggggcccggcccgacgccgaggtggacgaacagcgcatcgtcgccgactacctcgcccagctcggttcccccgtcgcccccgagcgcctcgagggcgacgcgtggctcccggagttcctcgagttcgtacggcgcaccgacgggcccgcgagggacttcgacgccgggcggatcctcgcgatgaaggacgtcttcctcaacaacgcccggctcacccgccgtttcacacccggcgtgttcaccggcgacatggtgttcttcgcctccgcacggcccggttccgagcaggccgccgaacgcgtcggcctgtggcacccccacgtcaccggcgacctcgacctgcacctgatcgactgcgcacacgaggagatgaccgatccagccgcactcacccggatcggccccgtgctcgccgcacggctgggcgccggcacctga

SEQ ID NO: 4 - DNA, 853 bp, Streptomyces roseosporus
cccgcagccggacagcggagacggaaggagggccgacatgagggcgacatccaggatgatccaggtcaacggcgcccggatcgcctgctccgacagcggctgcggtgacccggtgctgatgatcgccggcaccggcagtaccggccgggtgtgggacgcctaccaggtgcctgacctgcacgcggccggattccgcaccatcacgttcaccaatcgcggcgtaccgccgtccgacgagtgcgagcggggcttcaccctcgccgacctcgccgccgacaccgccgcgctgatcgaacaggtggcgggcggaccctgccgcgtcgtgggcacgtccctgggcgcccaggtggcccaggaagtcgccctggcccgcccggacctggtgacccaggcggtgttcatggccacccggggtcgcaccgacgcgatgcgggccgccgccaccagggcggccgccgccctgtacgacagcggcgtcgaactgccccccgcctacgcggcggctgtccgcgcgctgcagaacctctccccccacaccctccgggaccgccatcaggtcgaggactggctcccactcttcgagtacgccgaacgggacgggccgggggtccgtgcgcagttggaactcggcctgctgcccgaccgcctcgcggactaccgggacatcaccgtcccctgcctggtcatcgcgttcgaggacgacgtcgtcaccccgccgtacctgggccgcgaagtggccgacgcgatccccggcgcccgcttcgagaccgttccccgctgcggccactacggctacctcgaggatgcgagcgcggtcaacaagattcttcgcgatttcttccgaacgagctga

SEQ ID NO: 5 - DNA, 37 bp, Streptomyces roseosporus
cccgcagccggacagcggagacggaaggagggccgac

SEQ ID NO: 6 - DNA, 816 bp, Streptomyces roseosporus
atgagggcgacatccaggatgatccaggtcaacggcgcccggatcgcctgctccgacagcggctgcggtgacccggtgctgatgatcgccggcaccggcagtaccggccgggtgtgggacgcctaccaggtgcctgacctgcacgcggccggattccgcaccatcacgttcaccaatcgcggcgtaccgccgtccgacgagtgcgagcggggcttcaccctcgccgacctcgccgccgacaccgccgcgctgatcgaacaggtggcgggcggaccctgccgcgtcgtgggcacgtccctgggcgcccaggtggcccaggaagtcgccctggcccgcccggacctggtgacccaggcggtgttcatggccacccggggtcgcaccgacgcgatgcgggccgccgccaccagggcggccgccgccctgtacgacagcggcgtcgaactgccccccgcctacgcggcggctgtccgcgcgctgcagaacctctccccccacaccctccgggaccgccatcaggtcgaggactggctcccactcttcgagtacgccgaacgggacgggccgggggtccgtgcgcagttggaactcggcctgctgcccgaccgcctcgcggactaccgggacatcaccgtcccctgcctggtcatcgcgttcgaggacgacgtcgtcaccccgccgtacctgggccgcgaagtggccgacgcgatccccggcgcccgcttcgagaccgttccccgctgcggccactacggctacctcgaggatgcgagcgcggtcaacaagattcttcgcgatttcttccgaacgagctga

SEQ ID NO: 7 - protein, 2379 aa, Streptomyces roseosporus
MTQRAMEDILPLTPLQEGLLFHSVYDEQSVDVYTVQVVVDLEGPVDPEALRAAAAALLRRHANLRAAFRYERLQRPVQIIPREVAVPWEHTDVAKLEGAEQKAEIERLLHDQRWRRFDLTAPPLLRFLLVRTGHDRHRFALTFHHILMDGWSMPVLLRELITLYRTGDETALPWVRPYRDYLAWISRRDRDEAGRAWSKALAGVDEATLVAPGADRAAEPPLWTESRLEPDLAATLAARAREFGVTLNTLVQAAWALVLGRLTGRDDVVFGVTVSGRPPELAGVEDMVGLFINTVPLRAELLPHESLRDFTVRLQREQIQLLDHQYERLAVIQRLAGRTELFDTVMVFENYPVAAASSAGADGPAAEPRVADVHVRDAMHYPLGLLVLPGPPLRLRFGHRPSALPAERVTTIRDSLVRALELMADQPDLAVGRADILGEEEKQHLLTGLNDTHRDVPPLTVPGMIEAQAARTPGRPAVHARDGELSYAELNARANRLARHLAAAGVGPEQYVTLLLPLSARMVVAALAVMKTGAAYVPVDPEYPADRIAYMLGDIGPALVLTDSRSAAAMPAGPARVLTLDDDALDTGVRALPEHDLGTDGIAPLPDQPAYVIYTSGSTGRPKGVVILHRSVTGYLLRTIEEYPEAAGKAFVHSPVSFDLTVGALYAPLVSGGCLRLGSFTDDKILDLGEDSPTFMKATPSHLAVLDSLPDEISPTGAITLGGEQLLSETLDPWRARHPGVTVFNVYGPTETTINCAEHRIAPGTTLPPGPVPIGRPLWNTRLYVLDGGLRVVPTGVAGELYVAGAGLARGYLGRPGLTAERFVACPFGAPGERMYRTGDLVRWRTDGTLEFVGRVDDQVKVRGFRIELGEVEATVAATPGVARAIVAVREDRPGDQRLVAYVTPADVDPTGGLPSAVTAHAAARLPAYMVPSAVVVLHEVPLTPNGKINRAALPAPEAVSGAGFRAPGTAREEVLCGLFAEVLGLERVGTADDFFELGGHSLLATRLVSRVRSVLGVELGVRALFDAPTPGRLDRLLGERSGAPVRAPLTARERTGRDPLSYAQQRLWFLHELEGHGATYNIPLALRLTGPLDVTALEAALTDVVARHESLRTLIARDGTGTAWQHILPTGDPRARITLEAVPLHRDELAGRLAEAARHPFDLTAEIPVRATVFRTERDDHTLLVVTHHIASDRWSREPFLRDLSAAYAARRAHSAPELPPLSVQYADYAAWQRDVLGTEDDGTSEMAGQLAHWRGRLAGLPQGLDLPTDRPRRPDVGRRGGRCRLEIPAALHRDIVTLARVTSTTVFMVVQAALAGLLSRLGAGTDIPIGTPIAGRTDEATEHLIGFFVNTLVLRTDVSGDPTFAELLARVRATDLDAYAHQDVPFERLVEVLNPERSLLRHPLFQILLAFQNTEDRSISDRPGTLLPDLQVTEQPLDAGTAKFDLAFAFTERPPEKGEPSGITGIVEYHADLYDEGTVRQIADCFVQFLDAAVHAPGTRVDAVGLLPEHTLHKLLTRSRGTVTGLPPATLPELFEARVAAHPGHIAVEVAGRRPATTTYDALNRRANRLARLLTDRGVRPEQRVAIALPRSADLVTAWLGILKAGAVCVPVDPAYPDDRIAHMAADAAPALLIASAATRDRMLPTGIPVLDLDDPAVTAALAAAPDGNPRGTGLLPAHPAYVIYTSGSTGTPKGVVVTHEGIPALAATQQEALRAGPGDRVLQLVSTSFDASVWDLCSALLSGATLVLAPDADLFGDELAAALTAHRITHVTLPPAALAAVPAGAAPPRLTVTVTGDVCGPQLVDRWAGGERRILNGYGPTEVTVGATYAVCERTGDGAPVPIGAPWPDQRVYVLEHRLRPVPAGCVGEIYVAGAGLARGYLGRPGQTAERFVADPFGAPGERMYRTGDLARRRSDGHLLFEGRADTQVKIRGFRVELAEIEAALASHPGVEDAVVTVYDDGLGDQRLVAYVTGGPGTPSAAALRAHLASRLPRHMVPGDVLTLDALPLTANGKVDRTALPGPGTQTAAPGRAPQSPQERVLCALFADVLGRETVGVDEGFFDLGGHSLLATRLAARVRAALGVEISVRTLFEAPTPALLASACTADAAAYDPFETVLPLRRTGSRPPLFCVHAGMGLSWAYAGLLSHLDADVPVYGLQARRLTAPGGLPGSVEEMAEDYAGEIRRLCPDGPYRLLGWSFGGTVAHAVATRLQQQGHTVELLAVLDAYPVTGARPDAEVDEQRIVADYLAQLGSPVAPERLEGDAWLPEFLEFVRRTDGPARDFDAGRILAMKDVFLNNARLTRRFTPGVFTGDMVFFASARPGSEQAAERVGLWHPHVTGDLDLHLIDCAHEEMTDPAALTRIGPVLAARLGAGT

SEQ ID NO: 8 - protein, 272 aa, Streptomyces roseosporus
MRATSRMIQVNGARIACSDSGCGDPVLMIAGTGSTGRVWDAYQVPDLHAAGFRTITFTNRGVPPSDECERGFTLADLAADTAALIEQVAGGPCRVVGTSLGAQVAQEVALARPDLVTQAVFMATRGRTDAMRAAATRAAAALYDSGVELPPAYAAAVRALQNLSPHTLRDRHQVEDWLPLFEYAERDGPGVRAQLELGLLPDRLADYRDITVPCLVIAFEDDVVTPPYLGREVADAIPGARFETVPRCGHYGYLEDASAVNKILRDFFRTSN

SEQ ID NO: 9 - protein, 5830 aa, Streptomyces roseosporus
MDMQSQRLGVTAAQQSVWLAGQLADDHRLYHCAAYLSLTGSIDPRTLGTAVRRTLDETEALRTRFVPQDGELLQILEPGAGQLLLEADFSGDPDPERAAHDWMHAALAAPVRLDRAGTATHALLTLGPSRHLLYFGYHHIALDGYGALLHLRRLAHVYTALSNGDDPGPCPFGPLAGVLTEEAAYRDSDNHRRDGEFWTRSLAGADEAPGLSEREAGALAVPLRRTVELSGERTEKLAASAAATGARWSSLLVAATAAFVRRHAAADDTVIGLPVTARLTGPALRTPCMLANDVPLRLDARLDAPFAALLADTTRAVGTLARHQRFRGEELHRNLGGVGRTAGLARVTVNVLAYVDNIRFGDCRAVVHELSSGPVRDFHINSYGTPGTPDGVQLVFSGNPALYTATDLADHQERFLRFLDAVTADPDLPTGRHRLLSPGTRARLLDDSRGTERPVPRATLPELFAEQARRTPDAPAVQHDGTVLTYRDLHRSVERAAGRLAGLGLRTEDVVALALPKSAESVAILLGIQRAGAAYVPLDPTHPAERLARVLDDTRPRYLVTTGHIDGLSHPTPQLAAADLLREGGPEPAPGRPAPGNAAYIIQTSGSTGRPKGVVVTHEGLATLAADQIRRYRTGPDARVLQFISPGFDVFVSELSMTLLSGGCLVIPPDGLTGRHLADFLAAEAVTTTSLTPGALATMPATDLPHLRTLIVGGEVCPPEIFDQWGRGRDIVNAYGPTETTVEATAWHRDGATHGPVPLGRPTLNRRGYVLDPALEPVPDGTTGELYLAGEGLARGYVAAPGPTAERFVADPFGPPGSRMYRTGDLVRRRSGGMLEFVGRADGQVKLRGFRIELGEVQAALTALPGVRQAGVLIREDRPGDPRLVGYIVPAPGAEPDAGELRAALARTLPPHMVPWALVPLPALPLTSNGKLDRAALPVPAARAGGSGQRPVTPQEKTLCALFADVLGVTEVATDDVFFELGGHSLNGTRLLARIRTEFGTDLTLRDLFAFPTVAGLLPLLDDNGRQHTTPPLPPRPERLPLSHAQQRLWFLDQVEGPSPAYNIPTAVRLEGPLDIPALAVALQDVTNRHEPLRTLLAEDSEGPHQVILPPEAARPELTHSTVAPGDLAAALAEAARRPFDLAGEIPLKAHLFGCGPDDHTLLLLVHHTAGDGASVEVLVRDLAHAYGARRAGDAPHFEPLPLQYADHTLRRRHLLDDPSDSTQLDHWRDALAGLPEQLELPTDHTRPAVPTRRGEAIAFTVPEHTHHTLRAMAQAHGVTVFMVMQAALAALLSRHGAGHDIPLGTPVAGRSDDGTEDLVGFFVNTLVLRNDVSGDPTFAELVSRVRAANLDAYAYQDVPFERLVDVLKPERSLSWHPLFQIMIAYNGPATNDTADGSRFAGLTSRVHAVHTGMSKFDLSFFLTEHADGLGIDGALEFSTDLFTRITAERLVQRYLTVLEQAAGAPDRPISSYELLGDDERALLAQWNDTAHPTPPGTVLDLLESRAARTPDRPAVVENDHVLTYADLHTRANRLARHLITAHGVGPERLVAVALPRSAELLVALLAVLKTGAAYVPLDLTHPAERTAVVLDDCRPAVILTDAGAARELPRRDIPQLRLDEPEVHAAIAEQPGGPVTDRDRTCVTPVSGEHVAYVIYTSGSTGRPKGVAVEHRSLADFVRYSVTAYPGAFDVTLLHSPVTFDLTVTSLFPPLVVGGAIHVADLTEACPPSLAAAGGPTFVKATPSHLPLLTHEATWAASAKVLLVGGEQLLGRELDKWRAGSPEAVVFNDYGPTEATVNCVDFRIDPGQPIGAGPVAIGRPLRNTRVFVLDGGLRAVPVGVVGELHVAGEGLARGYLGQPGLTAERFVACPFGDAGERMYRTGDLVRWRADGMLEFVGRVDDQVKVRGFRIELGEVEAAVAACPGVDRSVVVVREDRPGDRRLVAYVTAAGDEAEGLAPLIVETAAGRLPGYMVPSAVVVLDEIPLTPNGKVDRAALPAPRVAPAAEFRVTGSPREEALCALFAEVLGVERVGVDDGFFDLGGDSILSIQLVARARRAGLEVSVRDVFEHRTVRALAGVVRESGGVAAAVVDSGVGAVERWPVVEWLAERGGGGLGGAVRAFNQSVVVATPAGITWDELRTVLDAVRERHDAWRLRVVDSGDGAWSLRVDAPAPGGEPDWITRHGMASADLEEQVNAVRAAAVEARSRLDPLTGRMVRAVWLDRGPDRRGVLVLVAHHLVVDGVSWRIVLGDLGEAWTQARAGGHVRLDTVGTSLRGWAAALAEQGRHGARATEANLWAQMVHGSDPLVGPRAVDPSVDVFGVVESVGSRASVGVSRALLTEVPSVLGVGVQEVLLAAFGLAVTRWRGRGGSVVVDVEGHGRNEDAVPGADLSRTVGWFTSIYPVRLPLEPAAWDEIRAGGPAVGRTVREIKECLRTLPDQGLGYGILRYLDPENGPALAQHPTPHFGFNYLGRVSVSADAASLDEGDAHADGLGGLVGGRAAADSDEEQWADWVPVSGPFAVGAGQDPVLPVAHAVEFNAITLDTPDGPRLSVTWSWPTTLLSESRIRELARFWDEALEGLVAHARRPDAGGLTPSDLPLVALDHAELEALQADVTGGVHDILPVSPLQEGLLFHSSFAADGVDVYVGQLTFDLTGPVDADHLHAVVESLVTRHDVLRTGYRQAQSGEWIAVVARQVHTPWQYIHTLDTDADTLTNDERWRPFDMTQGPLARFTLARINDTHFRFIVTYHHVILDGWSVAVLIRELFTTYRDTALGRRPEVPYSPPRRDFMAWLAERDQTAAGQAWRSALAGLAEPTVLALGTEGSGVIPEVLEEEISEELTSELVAWARGRGVTVASVVQAAWALVLGRLVGRDDVVFGLTVSGRPAEVAGVEDMVGLFVNTIPLRARMDPAESLGAFVERLQREQTELLEHQHVRLAEVQRWAGHKELFDVGMVFENYPMDSLLQDSLFHGSGLQIDGIQGADATHFALNLAVVPLPAMRFRLGYRPDVFDAGRVRELWGWIVRALECVVCERDVPVSGVDVLGAGERETLLGWGAGAEPGVRALPGAGAGAGAGLVGLFEERVRTDPDAVAVRGAGVEWSYAELNARANAVARWLIGRGVGPERGVGVVMDRGPDVVAMLLAVAKSGGFYLPVDPQWPTERIDWVLADAGIDLAVVGENLAAAVEAVRDCEVVDYAQIARETRLNEQAATDAGDVTDGERVSALLSGHPLYVIYTSGSTGLPKGVVVTHASVGAYLRRGRNAYRGAADGLGHVHSSLAFDLTVTVLFTPLVSGGCVTLGDLDDTANGLGATFLKATPSHLPLLGQLDRVLAPDATLLLGGEALTAGALHHWRTHHPHTTVINAYGPTELTVNCAEYRIPPGHCLPDGPVPIGRPFTGHHLFVLDPALRLTPPDTIGELYVAGDGLARGYLGRPDLTAERFVACPFRSPGERMYRTGDLARWRSDGTLEFIGRADDQVKIRGFRIELGEVEAAVAAHPHVARAIAVVREDRPGDQRLVAYVTGSDPSGLSSAVTDTVAGRLPAYMVPSAVVVLDQIPLTPNGKVDRAALPAPGTASGTTSRAPGTAREEILCTLFADVLGLDQVGVDEDFFDLGGHSLLATRLTSRIRSALGIDLGVRALFKAPTVGRLDQLLQQQTTSLRAPLVARERTGCEPLSFAQQRLWFLHQLEGPNAAYNIPMALRLTGRLDLTALEAALTDVIARHESLRTVIAQDDSGGVWQNILPTDDTRTHLTLDTMPVDAHTLQNRVDEAARHPFDLTTEIPLRATVFRVTDDEHVLLLVLHHIAGDGWSMAPLAHDLSAAYTVRLEHHAPQLPALAVQYADYAAWQRDVLGTENNTSSQLSTQLDYWYSKLEGLPAELTLPTSRVRPAVASHACDRVEFTVPHDVHQGLTALARTQGATVFMVVQAALAALLSRLGAGTDIPIGTPIAGRTDQAMENLIGLFVNTLVLRTDVSGDPTFAELLARVRTTALDAYAHQDIPFERLVEAINPERSLTRHPLFQVMLAFNNTDRRSALDALDAMPGLHARPADVLAVTSPYDLAFSFVETPGSTEMPGILDYATDLFDRSTAEAMTERLVRLLAEIARRPELSVGDIGILSADEVKALSPEAPPAAEELHTSTLPELFEEQVAARGHAVAVVCEGEELSYKELNARANRLARVLMERGAGPERFVGVALPRGLDLIVALLAVTKTGAAYVPLDPEYPTDRLAYMVTDANPTAVVTSTDVHIPLIAPRIELDDEAIRTELAAAPDTAPCVGSGPAHPAYVIYTSGSTGRPKGVVISHANVVRLFTACSDSFDFGPDHVWTLFHSYAFDFSVWEIWGALLHGGRLVVVPFEVTRSPAEFLALLAEQQVTLLSQTPSAFHQLTEAARQEPARCAGLALRHVVFGGEALDPSRLRDWFDLPLGSRPTLVNMYGITETTVHVTVLPLEDRATSLSGSPIGRPLADLQVYVLDERLRPVPPGTVGEMYVAGAGLARGYLGRPALTAERFVADPNSRSGGRLYRTGDLAKVRPDGGLEYVGRGDRQVKIRGFRIELGEIEAALVTHAGVVQAVVLVRDEQTDDQRLVAHVVPALPHRAPTLAELHEHLAATLPAYMVPSAYRTLDELPLTANGKLDRAALAGQWQGGTRTRRLPRTPQEEILCELFADVLRLPAAGADDDFFALGGHSLLATRLLSAVRGTLGVELGIRDLFAAPTPAGLATVLAASGTALPPVTRIDRRPERLPLSFAQRRLWFLSKLEGPSATYNIPVAVRLTGALDVPALRAALGDVTARHESLRTVFPDDGGEPRQLVLPHAEPPFLTHEVTVGEVAEQAASATGYAFDITSDTPLRATLLRVSPEEHVLVVVIHHIAGDGWSMGPLVRDLVTAYRARTRGDAPEYTPLPVQYADYALWQHAVAGDEDAPDGRTARRLGYWREMLAGLPEEHTLPADRPRPVRSSHRGGRVRFELPAGVHRSLLAVARDRRATLFMVVQAALAGLLSRLGAGDDIPIGTPVAGRGDEALDDVVGFFVNTLVLRTNLAGDPSFADLVDRVRTADLDAFAHQDVPFERLVEALAPRRSLARHPLFQIWYTLTNADQDITGQALNALPGLTGDEYPLGASAAKFDLSFTFTEHRTPDGDAAGLSVLLDYSSDLYDHGTAAALGHRLTGFFAALAADPTAPLGTVPLLTDDERDRILGDWGSGTHTPLPPRSVAEQIVRRAALDPDAVAVITAEEELSYRELERLSGETARLLADRGIGRESLVAVALPRTAGLVTTLLGVLRTGAAYLPLDTGYPAERLAHVLSDARPDLVLTHAGLAGRLPAGLAPTVLVDEPQPPAAAAPAVPTSPSGDHLAYVIHTSGSTGRPKGVAIAESSLRAFLADAVRRHDLTPHDRLLAVTTVGFDIAGLELFAPLLAGAAIVLADEDAVRDPASITSLCARHHVTVVQATPSWWRAMLDGAPADAAARLEHVRILVGGEPLPADLARVLTATGAAVTNVYGPTEATIWATAAPLTAGDDRTPGIGTPLDNWRVHILDAALGPVPPGVPGEIHIAGSGLARGYLRRPDLTAERFVANPFAPGERMYRTGDLGRFRPDGTLEHLGRVDDQVKVRGFRIELGDVEAALARHPDVGRAAAAVRPDHRGQGRLVAYVVPRPGTRGPDAGELRETVRELLPDYMVPSAQVTLTTLPHTPNGKLDRAALPAPVFGTPAGRAPATREEKILAGLFADILGLPDVGADSGFFDLGGDSVLSIQLVSRARREGLHITVRDVFEHGTVGALAAAALPAPADDADDTVPGTDVLPSISDDEFEEFELELGLEGEEEQW

SEQ ID NO: 10 - DNA, 17493 bp, Streptomyces roseosporus
atggacatgcagtcgcagcgcctcggcgtcaccgccgcccaacagagcgtctggctcgccggccagctggcggacgaccaccgcctgtaccactgtgcggcgtacctgtcactcaccgggtccatcgacccgcggacactcggcacggcggtccggcggaccctcgacgagaccgaggcgctgcgtacccggttcgtaccgcaggacggggaactgctgcagatcctcgaacccggtgccggacagctcctgctggaagccgacttctccggcgacccggaccccgagcgggcggcacacgactggatgcacgcggcgctcgccgcaccggtccgcctcgaccgcgccgggaccgccacccacgccctgctcaccctcggcccgtcccgccacctgctgtacttcggctaccaccacatcgcgctcgacggctacggtgccctgctccacctgcgccgcctcgcccacgtctacaccgccctcagcaacggggacgaccccggcccctgcccgttcggccccctggccggtgtcctcacggaggaggcggcctaccgtgactccgacaaccatcggcgcgacggggaattctggacccggtccctcgccggtgcggacgaggcccccgggctgagcgagcgggaggccggcgctctcgccgtcccgctgcgccgcaccgtggagctgtccggcgaacggacggagaagctggccgcctcggccgcggccactggagctcgctggtcgtcactgctcgtcgccgccaccgccgcgttcgtacgccgccacgctgccgccgacgacaccgtcatcggcctgcccgtcaccgcccggctcaccgggccggcgctgcgtaccccgtgcatgctcgccaacgacgtgccgctgcgcctcgacgcccggctcgatgccccgttcgccgcgctccttgccgacaccacccgcgccgtcggcacgctggcgcgccaccagcggttccgcggggaagaactccaccggaacctggggggcgtcggccgcaccgcgggcctggcgcgggtcaccgtcaacgtcctggcgtatgtcgacaacatccggttcggcgactgccgggccgtggtccacgagttgtcctcgggaccggtccgcgacttccacatcaactcctacggcacccccggcacccccgacggcgtccagctggtcttcagcggtaaccccgccctgtacacggccaccgatctggccgaccaccaggagcggttcctgcgcttcctcgacgctgtgaccgccgacccggacctgccgaccggaagacaccgcctcctgtcgccgggcacccgcgcccggctgctcgacgactcccgcggcacggaacgccccgtaccgcgtgccaccttgccggaactcttcgccgaacaggcccggcgcacccccgacgcgcccgccgtccagcacgacggcaccgtcctcacctaccgcgacctgcaccggagtgtcgaacgggcggccggacggctggccggcctcggcctgcgtaccgaggacgtcgtcgccctcgccctccccaagtccgccgagagcgtcgcgatcctgctcggcatccagcgggccggcgccgcctacgtgccgctggaccccacccatccggccgagcggctggcccgtgtactcgacgacacccgaccccggtacctcgtcaccaccggacacatcgacggcctgtcccaccccacgccgcagttggccgccgccgacctcctccgtgagggcggcccagagcccgccccgggccgcccggcacccggcaacgcggcgtacatcatccagacctccggctccaccggacggccgaagggtgtcgtcgtcactcacgaagggctggccaccctcgccgccgaccagatccggcgctaccgcacgggaccggacgcccgcgtactgcagttcatctccccggggttcgacgtcttcgtctccgaactgagcatgaccctcctgtccggcggctgcctggtgataccgccggacggcctgaccggccgtcacctcgccgacttccttgccgcggaggccgtcaccaccacatccctcacccccggcgcactcgccaccatgcccgccacagatctcccgcacctgcggactctgatcgtcggcggagaggtctgcccgccggagatcttcgaccagtggggccggggccgggacatcgtcaacgcgtacgggcccaccgagacaaccgtcgaggcgaccgcctggcaccgtgacggtgccacccacggccccgtcccgctcggccgccccaccctcaaccggcgcggctacgtcctcgacccggcgctcgaacccgtccccgacgggacgaccggcgaactgtacctggccggcgagggcctcgcccggggctacgtcgctgctcccgggcccaccgccgagcgtttcgtcgccgacccgttcggcccgcccggcagccgcatgtaccgcaccggtgacctggtgcggcggcgctccggcggcatgctggaattcgtcggacgagccgacggacaggtcaaactccgcggcttccgcatcgaactcggcgaggtccaggccgcgctcaccgctctccccggggtacgtcaggccggcgtcctgatccgcgaggaccgccccggggacccccggctcgtcgggtacatcgtgcccgcgcccggcgccgaaccggacgccggtgagctccgtgcggccctggcccgtaccctcccgccccacatggtgccctgggcgctcgtccccctccccgcactgccgctgacgtccaacggcaaactggacagggcggcccttcccgtccccgccgcccgcgccggcggatccgggcaacgcccggtcaccccacaggagaagacactctgcgccctgttcgccgacgtcctcggcgtaacggaggtcgccacggacgacgtgttcttcgagctcggcggccactccctcaacggcacccggctgctcgcccggatcaggaccgagttcggcaccgacctcaccctccgcgacctgttcgccttccccaccgtcgccggccttctcccgctcctggacgacaacggacggcagcacaccaccccgccgctgcctccgcgcccggagcgcctccccctgtcgcacgcgcagcagcgactgtggttcctcgaccaggtcgaaggccccagccccgcgtacaacatccccaccgccgtccggctcgaaggcccgctcgacatcccggccctcgctgtcgccctgcaggacgtcaccaaccgccacgagcccttgcgtactctcctcgccgaggactccgaaggcccccaccaggtcatcctgccccccgaggccgcccgccccgaactgacccacagcaccgtcgcgcccggcgatctcgccgcagccctcgccgaagccgcacgccgccccttcgacctcgccggtgagatcccactcaaagcccacctgttcggctgcggcccggacgaccacaccctgctgctcctcgtccaccacaccgccggcgacggagcctccgtcgaggtcctcgtacgcgatctcgcccacgcctacggcgcccgccgcgccggcgacgccccgcacttcgagccgctgcccctgcagtacgccgaccacaccctgcgccgacggcacctgctggacgatccgtcggacagcacacagctcgaccactggcgcgacgccctggccggcctgcccgagcagctcgaactgcccaccgaccacacccggcccgccgttcccacccgccggggcgaggcgatcgccttcaccgtgcccgagcacacgcaccacacgctgcgggccatggcccaggcccacggcgtcaccgtgttcatggtcatgcaggccgcgctcgccgccctgctgtcgcggcacggcgcgggccacgacatccccctcggaacacccgtcgcgggccgctccgacgacggcacggaagacctcgtcgggttcttcgtcaacacgctcgtactgcgcaacgacgtctccggggacccgacgttcgcggaactcgtgtcgcgggtgcgggccgccaacctggacgcgtacgcctaccaggacgttcccttcgagcgtctcgtcgacgtactcaaaccggagcggtccctgtcctggcacccgctcttccagatcatgatcgcgtacaacggcccggcgacgaacgacaccgccgacgggtcccgcttcgcgggcctcaccagccgcgtccatgccgtccacaccggcatgtccaagttcgacctgtcgttcttcctcaccgagcacgcggacggcctcggcatcgacggcgctctcgagttcagcaccgatctcttcacgcggatcaccgcggagcgcctggtccagcgctacctcaccgtcctggagcaagccgccggagcaccggaccgccccatcagttcgtacgaactcctcggcgacgacgaacgcgcactcctcgcccaatggaacgacaccgcccaccccacccccccaggcacggtgctcgatctcctcgaaagccgtgcggcgcggacccccgaccggccggccgtcgtcgagaacgaccacgtcctcacctacgccgacctgcacacccgggccaaccggctcgcccgccacctgatcaccgcccacggcgtcggtcccgaacgtctcgtcgccgtcgccctgccccggtccgccgagctgctggtggcacttctcgcggtcctcaagaccggagccgcctacgtccctctcgacctcacccaccccgccgagcgcaccgccgtcgtcctcgacgactgccggccggccgtgatcctcaccgacgccggtgcggcccgtgaactgccgcggcgcgacatcccacagctccgcctcgacgaacccgaggtccacgcggcgatcgcggaacaaccggggggtccggtcaccgaccgggaccgcacgtgcgtcactccggtcagcggcgagcacgtggcatacgtgatctacacatccggctccacgggccggcccaagggtgtggcggtggaacaccgttcactggccgacttcgtgcggtactccgtgaccgcgtaccccggagccttcgacgtcaccctgctgcacagccccgtgaccttcgacctcaccgtgacctcgctgttcccgccactggtcgtcggtggcgccatccatgtcgcggacctgaccgaggcgtgcccaccgagcctggccgcggcgggcgggccgacgttcgtcaaggccacaccgagccatctgccactgctcacgcacgaggcgacatgggccgcgtccgcgaaggtgctgctcgtcgggggcgagcagttgctgggaagggagctggacaagtggcgggccgggtcgccggaggccgtcgtcttcaacgactacggccccaccgaggccacggtcaactgcgtggacttccgtatcgatccgggacaaccgatcggtgcggggccggtggcgatcggccgcccgttgcggaacacgcgggtgttcgtgctcgacggtgggttgcgggcggtgccggtcggtgtggtcggtgagctccatgtggcgggcgaggggctggcgcggggttatctcgggcagccgggtctgacggcggagcggttcgtggcgtgtccgttcggtgatgccggggagcggatgtaccgcacgggtgacctggtgcggtggcgtgcggatgggatgctggagttcgtcggccgggtcgacgatcaggtcaaggtgcggggtttccggatcgagctgggcgaggtggaggccgctgtcgcggcctgcccgggtgtggaccgctccgtggtggtggtacgggaggaccgaccgggagaccgccggctggtggcgtatgtgacggccgccggtgacgaggcggaggggctggcaccgctgatcgtggagacggccgcgggccgtctgcccgggtacatggtgccgtcggccgtggtcgtactggacgagattcccctgacgccgaacggcaaggtggaccgtgccgcgctgcccgcgccgcgcgtcgccccggccgcggagttccgcgtcaccggatcaccccgtgaagaggctctgtgcgccctgttcgcggaagtgctgggcgtggaacgggtcggcgtggacgacgggttcttcgacctcggcggagacagcattctgtccattcaactggtggcgcgggcgcgccgggcgggtctggaggtgtcggtgcgggacgttttcgagcaccgcaccgtacgggcgctggccggtgtggtgcgggagtccggaggcgtcgctgccgccgtcgtggactccggtgtgggtgcggtggagcggtggccggtggtggagtggctggcggagcgtggtggcggtgggctcggcggtgcggtcagggccttcaaccagtccgtcgtggtcgccacaccggccggtatcacctgggacgaactgcggacggtcctggacgcggtacgcgaacgccacgacgcctggcggctacgggtagtggattccggtgacggcgcctggtccctgcgcgtcgacgcgcccgcccccggcggtgagcccgactggatcacccggcacggcatggccagcgccgacctggaggagcaggtgaacgccgtgcgggccgccgccgtggaggcccggagccggctcgatccactgaccggacggatggtccgcgcggtatggctggaccgtggacccgaccgccggggagtcctggtcctggtggcgcaccacctggtcgtcgacggcgtctcctggcgcatcgtcctcggcgacctcggcgaagcctggacacaggcacgcgctggcgggcatgtgcggttggacacggtcggcacatcgctgcgcggctgggcggcggcgctggcggaacagggccgccacggcgcccgcgccaccgaagcaaacctgtgggcacagatggtccacggctcggaccctctggtcggcccacgcgcggtggacccttcggtggacgtcttcggcgtggtggagtcggtgggttcacgggcgtcggtgggggtgtcgcgtgccctgctgacggaggtcccgtcggtcctgggtgtgggcgtgcaggaagtgctgctggcggcattcggcctggcagtgacgcgctggcgcggccgcggcggaagcgtcgtcgtggacgtcgagggtcacggccgcaacgaagacgccgtacccggcgcggacctctcccgcaccgtggggtggttcaccagcatctaccccgtccgcctccccctcgagccggcggcctgggacgagatacgcgccggcggtcccgccgtcggacgcaccgtccgcgagatcaaggaatgcctccgcaccctgcccgaccagggcctgggctacggcatcctgcgctacctcgaccccgaaaacggacccgccctcgcccagcaccccaccccgcacttcggcttcaactacctcggacgggtctcggtctcggcggacgctgcctcactggacgaaggcgacgcccatgccgacgggctcggcggcctcgtcggcggcagggcagcggcggactccgacgaggaacagtgggccgactgggttccggtgtcgggtccgttcgcggtgggcgcgggtcaggaccccgttctgccggtggcccacgcggtggagttcaacgcgatcaccctggacacacccgacggcccccgcctcagcgtgacatggtcgtggccgacgacactgctgtccgaatcccggatacgagaactcgcccgcttctgggacgaagccctcgaagggctggtcgcacacgcccgccgtcccgacgcgggcggactgaccccctcggacctgccgctggtcgccctcgaccacgcggaactggaggccctgcaggccgacgtcaccggtggcgtgcacgacatcctgcccgtatcaccgcttcaggaaggactgctcttccacagctccttcgccgccgacggggtcgacgtctacgtgggacaactcacgttcgacctgaccggaccagtcgacgccgaccacctgcacgccgtggtcgaaagcctggtgacacgccacgacgtcctgcgcaccggctaccgccaggcacagtccggcgaatggatcgccgtcgtggcacgacaagtccacaccccctggcagtacatccacacactcgacacggacgccgacaccctcacaaacgacgagcgctggcggccgttcgacatgacgcagggcccactcgcacgattcaccctcgcacgcatcaacgacacccacttccgcttcatcgtcacgtaccaccacgtcatcctcgacggctggtccgtggcggttctcatacgcgaactcttcaccacctatcgcgacaccgccctcggccgccggccggaggttccgtactccccaccgcgccgtgacttcatggcgtggctcgccgaacgcgaccagaccgctgcgggacaggcatggcgttccgcgctggccggactcgcggagcccacagtgctcgccctcggaacggagggcagtggggtgattcccgaagtccttgaggaagagatcagcgaggaactgacctcggaactggtggcgtgggcgcgtgggcgtggtgtgacggtcgcgtcggtggtgcaggcggcctgggcgttggtgctggggcggctggtgggccgggacgacgtggtgttcggcctgaccgtgtcgggccggcccgccgaagtggcgggtgtggaggacatggtcggtctgttcgtgaacaccattccgttgcgggcccggatggacccggcggagtcactgggcgccttcgtggagcggctgcagcgggaacagacggaactgctcgagcaccagcacgtccggctggccgaggtccagcgctgggccggacacaaggaactcttcgacgtcggaatggtcttcgagaactacccgatggattccctgctgcaggattcactgttccacggcagtggcctgcagatcgacggaatacagggtgccgatgcgacgcatttcgctttgaacctggcagtggttccccttcccgccatgcgattccggctcggctatcggccggacgtgtttgacgcgggtcgggtgcgtgagctgtggggttggatcgtccgggccttggagtgcgtggtctgcgagcgtgatgtgccggtgtccggtgtcgatgtgctgggtgccggtgagcgggagacgctgctgggctggggtgcgggcgcggaacccggcgtgcgtgcgctgccgggtgcgggtgcgggtgcgggtgcggggctggtcgggttgttcgaggagcgggtgcggaccgacccggacgcggtggccgtgcgcggcgcgggagtggaatggagttacgcggagctgaacgcgcgggcgaatgcggtggcccggtggctgatcggccggggcgtgggacccgagcgcggtgtcggggtggtgatggaccgcggcccggacgtggtggccatgctcctcgcggtcgccaaaagcggcggcttctacctgcccgtcgacccgcaatggcccaccgaacgcatcgactgggtactcgccgacgccggcatcgacctggccgtcgtgggcgagaacctggccgctgcggtcgaggccgtccgcgactgcgaggtggtcgactacgcgcagatcgcccgcgaaacacggctgaacgagcaggcggccaccgacgccggtgatgtgacggacggggagcgcgtgtcggctctgctgtccgggcatccgctgtatgtcatctacacctccggctcgacgggcctgcccaagggcgtggtggtcacccacgcctcggtcggcgcctatctgcggcgcggccgcaacgcctaccgcggcgccgccgacggcctgggccacgtgcactcctcactcgcgttcgacctgaccgtgaccgttctgttcacccccctggtctccggcggctgcgtcaccctcggcgatctcgacgacaccgccaacggcctgggcgccaccttcctcaaggccactccttcccacctgcccctgctcggccaactcgaccgggtactcgcccccgacgccaccctcctcctcggcggcgaagccctcaccgccggcgccctgcaccactggcgcacccaccacccccacaccacggtcatcaacgcctacggcccgaccgaactcaccgtcaactgcgccgaataccgcatcccccccggccactgcctccccgacggccccgtccccatcggacgccccttcaccggccaccacctcttcgtcctcgaccccgccctccgcctcacaccccccgacaccatcggcgaactgtatgtggccggtgacggcctggcgcggggctatctcgggcgcccggacctgaccgccgaacgcttcgtggcctgccccttccgcagccccggcgaacgcatgtaccgcaccggcgacctcgcacgctggcgcagcgacggaacactcgaattcatcggccgtgccgacgaccaggtcaagatccgcggcttccgcatcgaactcggcgaagtcgaggcggctgtcgcggcgcatccgcacgtggcgcgggccatcgccgtcgtacgcgaggaccggcccggcgaccagcgcctggtcgcgtacgtgacaggcagcgacccgagcggcctgtcctcggcggtgacggacaccgtcgccggccgcctgcccgcgtacatggtgccgtcggccgtcgtcgtactggaccagatccccctcacccccaacggcaaggtcgaccgcgccgccctccccgcgcccgggaccgcctccggaaccacctcccgagcacccggcacagcccgtgaagagatcctgtgcaccctgttcgccgacgtactcggtctggatcaggtcggcgtggacgaggacttcttcgacctcggcggccattccctgctcgccacccgcctcacctcacggatccggtcggccctcggcatcgacctcggtgtccgagccctcttcaaagccccgaccgtcggccgcctggaccagctgctccagcaacagaccaccagcctccgggcacccctggtcgcgcgggagcgcaccggttgtgagccgctgtcgttcgcgcagcagcgcctgtggttcctccaccagctcgaaggccccaacgccgcgtacaacatccccatggctctgcgactcaccggccgcctggacctgaccgcgctggaagcggccctgacggatgtgatcgcccgccacgaaagcctgcgaacggtcatcgcccaggacgattcgggcggcgtgtggcagaacatcctgcccaccgacgacacccgcacccacctcaccctcgacaccatgccggtcgacgcgcacaccctgcagaatcgggtggacgaggccgcccgccatccgttcgacctcaccaccgagatccccctccgcgccaccgtcttccgcgtcaccgacgacgagcacgtcctcctgctcgtgctccaccacatcgccggcgacggctggtccatggcccccctggcccacgacctgtccgccgcctacaccgtcagactcgagcaccacgcaccgcaactgcccgctctggccgtccaatacgccgactacgccgcctggcaacgcgacgtcctgggcaccgagaacaacacatcgagccaactctccacccaactcgactactggtacagcaaactcgaaggcctccccgccgaactgaccctccccaccagtcgcgtccggcccgccgtggcctcccacgcatgcgaccgcgtcgagttcaccgtgccccacgacgtgcaccaaggcctgaccgcactcgcccgcacccagggcgccaccgtcttcatggtggtgcaggcggccctggcggccctgctgtcccgactcggcgccggcaccgacatccccatcggcacccccatcgccggccgcaccgaccaggcgatggagaacctgatcggactcttcgtcaacaccctcgtactgcgcaccgacgtctccggggacccgaccttcgccgagctcctggcccgtgtgcgcaccactgctctcgacgcatacgcacaccaggacatccccttcgaacgcctggtagaagccatcaaccccgaacgatccctcacccggcaccccctcttccaggtcatgctcgccttcaacaacacggaccgccgatccgcgctcgacgcgctcgacgccatgcccggccttcacgcacgaccggccgacgtcctggctgtgaccagcccctacgatctcgcgttctcgttcgtggagacacccggcagcacggagatgcccggcatcctggactacgcaaccgacctgttcgaccgctccacggccgaggccatgaccgaacgtctggtgcgcctcctcgcggagatcgcccgccggcccgagctgtccgtgggcgacatcggcatcctgtcggccgacgaggtgaaggccctcagccccgaggctcccccggcagccgaggaacttcacacctccacactgcctgagctgttcgaggagcaggtggcggctcggggccatgcggtcgcggtggtgtgcgaaggagaggagctgtcgtacaaggagttgaacgcgcgggcgaatcgcctggccagggtgctgatggagcgcggcgcaggccccgaacggttcgtgggcgtggcactaccgcgtggcctggacctcatcgtggcactcctggccgtgaccaaaaccggcgccgcatacgttccgctcgaccccgaataccccaccgaccgcctcgcgtacatggtcaccgacgccaaccccaccgcggtcgtgacctcaacggacgtacacatccccctgatcgccccccgcatcgagctcgacgacgaggcaatccgcaccgaactcgccgccgctcccgacacagccccctgtgtcgggagcggccccgcccaccccgcctacgtcatctacacctccggctccaccggtcgccccaagggcgtcgtcatcagccacgccaatgtcgtacgcctgttcaccgcatgctccgacagtttcgacttcggaccggaccacgtctggacgctcttccactcgtacgccttcgacttctcggtctgggagatctggggcgcgctgcttcacggcgggcggctcgtcgtcgtgccgttcgaggtgactcgttctcccgccgaattcctcgcgctgctcgccgagcagcaggtcacgctgctgagccagacaccgtccgcgttccatcagctgacggaggccgcccgccaggagccggcgcgctgcgccgggctggccctgcgacatgtggtcttcggcggcgaggcgctcgacccgtcgcgactgcgcgactggttcgacctgccgctcggctcacggccgacgctcgtgaacatgtacggcatcaccgagaccaccgtccacgtcacggtgctcccgctggaggatcgcgcgacgagtctttccggcagcccgatcggtcggcccttggccgatctgcaggtgtacgtcctcgacgaacggctccgcccggtgcccccaggcaccgtcggcgagatgtacgtggcaggcgccggtctggcccgcggctatctgggacgccccgctctgaccgccgagcggttcgtggccgacccgaattcccgttccggcggccgtctgtaccgcacaggcgacctggccaaggtgcggcccgacgggggactggagtatgtgggccgcggggaccggcaggtgaagatccgcggcttccggatcgaactcggcgagatcgaggccgcgctggtcacacacgcgggtgtcgtccaggcggtggtcctggtgcgggacgagcagaccgacgaccaacggcttgtcgcgcacgtggtgcccgcgctgccgcaccgggcgccgaccctggccgaactccacgagcacctcgcggcgaccctgccggcgtacatggtgccgtccgcgtaccggaccctggacgagctgccgctgacggccaacggaaagctcgaccgcgcggcgctggccgggcagtggcagggcggaacccgcacccggagactgcctcggacgccgcaggaagagatcctgtgcgagttgttcgccgacgtcctccggttgcccgccgccggggccgacgacgacttcttcgccctgggaggccattccctgctggcgacgcgcctcctgtcggctgtcaggggcaccctgggtgtggaactcggcatccgcgacctcttcgccgcgcccacgcctgccgggctcgcgaccgtactggcggcctccggcaccgccctgccacctgtgaccaggatcgaccggcgccctgaacggctcccgctgtccttcgcacagcggcgactgtggttcctgagcaagctggaagggcccagcgccacctacaacatcccggtcgccgtccggctcaccggcgccctcgacgtcccggctctccgggccgccctgggggacgtcaccgcacggcacgaatcactgcgtacggtcttccccgacgacgggggcgaaccccgccagctggtgctcccacacgccgaaccccccttcctcacgcacgaggtgaccgtcggagaggtggcggaacaggcggcgtccgccaccgggtacgccttcgacatcaccagcgatacgccgctgcgggccaccctgttgcgcgtctcaccggaggaacacgtcctcgtggtggtcatccaccacatcgccggcgacggctggtccatggggccgttggtgcgtgacctggtcaccgcctaccgggcccgaacgcggggcgacgccccggagtacaccccgcttcccgtgcagtacgccgactacgccctgtggcaacacgctgttgcgggcgacgaggacgccccggacggccggacggcgcgtcggctcgggtactggcgcgagatgctggccgggctgcccgaggagcacacgctgcccgccgaccggccccggcccgttcggtcctcgcaccggggcggccgggtacggttcgaactgcccgccggcgtgcaccggagtctgctggccgtggcgcgtgaccgtcgggccacgctgttcatggtggtgcaggctgcgctcgccggtctgttgtcccggctcggcgcgggcgacgacatccccatcggcaccccggtcgccgggcggggcgatgaagcgctggacgacgtcgtcgggtttttcgtcaataccctggtccttcggacgaatctcgcgggggatccgtccttcgccgacctggtggaccgggtcaggaccgccgacctcgacgcgttcgcgcaccaggacgtgcccttcgaacggctcgtggaggcgcttgcgccacggcgttccctcgcccgccacccgctgttccagatctggtacaccctcaccaacgccgaccaggacatcaccggccaggcactcaacgccctcccgggcctgaccggggacgagtacccgctgggggccagtgccgccaagttcgacctgtcgttcaccttcactgaacaccgcacccccgacggagacgccgccggcctgtccgttctgctcgactacagcagcgacctgtacgaccacggcactgccgccgcactgggccaccggctgaccggattcttcgcagcactggccgccgaccccaccgcccccctgggcaccgtcccgctcctcaccgacgacgagcgggaccgcatcctcggtgactggggcagcggtacgcacaccccgctgcccccgcgcagcgtggccgagcagatcgtccgccgggccgcgctggacccggacgccgtcgccgtcatcaccgcggaagaggaactctcgtaccgggaactggaaaggctcagcggtgagacggcgcggctgctggccgaccgggggatcggccgcgagagcctcgtcgccgtcgccctgccccgcacggccggcctggtcaccaccctgctcggcgtcctgcgcaccggcgccgcctacctcccgctcgacaccgggtaccccgccgagcgactcgcgcacgtgctctccgacgcccgtcccgacctcgtcctcacccacgccggcctcgccggacggctgccggccggcctcgcgccgaccgtcctcgtcgacgagccgcagccgcccgccgcagccgcccccgcggttcccacgtccccgtcgggcgaccacctcgcgtacgtcatccacacctccggctccaccggcaggcccaagggcgtcgcgatcgccgagtcctccctgcgcgccttcctcgcggacgcggtccggcgccacgacctgaccccgcacgaccggttgctcgcggtgaccaccgtcggcttcgacatcgccggcctcgaactgttcgccccgctcctcgccggtgccgcgatcgtgctggccgacgaggacgccgtacgcgaccccgcctcgatcacctccctgtgcgcacgccaccacgtcaccgtcgtccaggccacgcccagttggtggcgggccatgctcgacggagcaccggccgacgccgccgcccggctcgagcacgtacggatcctggtcggcggcgaaccgctgcccgccgacctggcccgtgtcctgaccgcaaccggcgccgccgtcaccaacgtgtacggacccaccgaagccaccatctgggccaccgccgccccactcaccgccggcgacgaccgcacacccggcatcggcacccccctggacaactggcgcgtccacatactcgacgcggccctcggacccgttcccccgggtgttccgggcgagatccacatcgccgggtccgggctcgcccgcggctatctgcgccgcccggacctcaccgccgaacgcttcgtcgccaacccgttcgcccccggcgagcggatgtaccgcaccggcgacctcggccggttccgcccggacggcacgctcgaacacctcggccgcgtggacgaccaggtcaaggtacggggcttccgcatcgaactcggcgacgtcgaggccgccctcgcccggcatcccgacgtggggcgcgccgccgccgccgtccgccccgaccaccgcggccagggccgccttgtcgcgtacgtcgtcccccgtcccggcacccggggaccggacgccggcgaactgcgcgagacggtacgcgaacttctgcctgactacatggtcccctccgcccaggtgactctcaccaccctgcctcacaccccgaacggcaaactcgaccgcgccgcgctgcccgcccccgtgttcggcacccctgccggacgcgcccccgccacccgcgaggaaaagatcctcgccgggctcttcgcggacatcctgggcctgcccgacgtgggagccgacagcggcttcttcgacctcggcggcgacagcgtgctgtccatccagctcgtgagccgcgcccggagggaaggactgcacatcaccgtacgagacgtgttcgagcacgggacggtcggcgcactcgccgccgcggcccttccggcaccggccgacgacgcggacgacaccgtccccggcacggacgtactgccttcgatcagcgacgacgaattcgaggagttcgagctggagctcggactcgagggggaggaagagcagtggtga

SEQ ID NO: 11 - protein, 7338 aa, Streptomyces roseosporus
VNRRSKVVEEILPVSALQEGLLFHSSFAAADGVDVYAGQLAFDLVGAVDTGRLRAAVESLVARHGVLRSSYRQARSGEWVAVVARRVATPWRAVDARDGATDAAAVAREERWRPFDLGRAPLARFVLVRTDDDRFRFVITYHHVILDGWSLPVLLRELLALYGSGADPSVLPPVRPYGDFLRWAAARDDAAAETAWRDALTGLDEPSLVAPGASPDGVVPASVHAELDKAGTENLAAWARHRGITQATAVRAAWALVLGQHTGRDDVVFGVTVSGRPAELAGAEHMVGLFINTVPLRTVLDPADTLGTFAARLQAEQTTLLEHQHVRLSDIQRWAGHKELFDTIVVFENYPIGHSGPGSIRTDDFTVTATEGSDATHYPLTLTAVPGETLRLKLDHRPDLVDTTTATALLRRVTRVLETATDDTGHTLARLDLLDDDERHRLLRGWNDTTREQPPTYYHQEFEEQARRRPHDTALVFTSTSWTYEELNDRANRLARLLVAAGAGSDDFVALAFPRSAESVVAILAVLKAGAAYLPLDMDQPAERLTGILADAHPTVVLTTTTATPLPHPGRTLVLDSPTTARALAAAPAHNLTDADRRTPLNARNAAYIIHTSGSTGRPKGVVIEHRSLANLFHDHRRALIEPHAAGGSRLKAGLTASLSFDTSWEGLICLAAGHELHLIDDDTRRDAERVAELIDRQRIDVIDVTPSFAQQLVETGILDEGRHHPAAFMLGGEGVDAKLWTRLSDVPGVTSYNYYGPTEFTVDALACTVGIAPRPVIGHPLDNTAAYILDGFLRPVPEGVAGELYLAGTQLARGYAGRPGLTAERFVACPFGAPGERMYRTGDLVRRSPGGVVEYLGRVDDQIKLRGFRIEPAEIELALAGHPAVAQNVVLLHRSATGEARLVAYVVPGTPVDPRELTGHLAARLPAYMVPSAFVLLDTLPLTPNGKLDRGALPEPAFGTAPRPERPRTPVEEILCGLYADVLGLPSFGADDDFFDAGGHSLLASKLVSRIRTNLKTELNVRALFEHRTVSSLATALHRAAQAGPALTAGPRPARIPLSYAQRRLWFLNRLDRDSAAYNMPVALRLRGPLDSTAMCAALTDVAERHEALRTVFEEDRDGAHQIVLPATGLGPLLTVTGADGTTLRALITEFVRRPFDLAAEIPFRAALFRVGDEEHVLVVVLHHIAGDGWSMGPLARDVAEAYRARAAGRAPDWEPLPVQYADYALWQREVLGAEDDETGELSAQLAHWRTRLAGAPAELTLPTDRPRPAVASTAGDRVEFTVPAGLHQALADLARAHGATVFMVVQAALAVLLSRLGAGDDIPIGTPVAGRTDEATEELIGFFVNTLVLRTDVSGDPTFAELLARVRATDLDAYAHQDVPFERLVEVLNPERSLARHPLFQVMLTFNVPDMDGVGSALGNLGELEVSGEAIRTDQTKVDLAFTCTEMYAADGAASGMRGVLEYRLDVFGAVQARETTERLVRVLEGVVSGGGGVSVSGVDVLGVGERERLLGWGVGGPVPVVPGGGLVGLFEERVRADADAVAVRGAGVVWSYGELNARVNVVARWLVGRGVGAECGVGVVMGRGVDVVVMLLAVAKAGGFYVPVDPEWPVERVGWVLADAGVGLVVVGEGLSHVVGDFPGGEVFEFSRVVRESCLVELVAADGVEVRNVTDGERASRLLPGHPLYVVYTSGSTGRPKGVVVTHASVGGYLARGRDVYAGAVGGVGFVHSSLAFDLTVTVLFTPLVSGGCVVLGELDESAQGVGASFVKVTPSHLGLLGELEGVVAGNGMLLVGGEALSGGALREWRERNPGVVVVNAYGPTELTVNCAEFLIAPGEEVPDGPVPIGRPFAGQRMFVLDAALRVVPVGVVGELYVAGVGLARGYLGRAGLTAERFVACPFGAPGERMYRTGDLVRWRVDGALEFVGRADDQVKVRGFRVELGEVEGAVAAHPDVVRAVVVVREDRPGDHRLVAYVTGVDTGGLSSAVMRAVAERLPAYMVPSAVVVLDEIPLTPNGKVDRAALPVPGVEAGAGYRAPVSPREEVLCGLFAEVLGLERVGVDDDFFGLGGHSLLATRLISRVRAVLGVEAGVRALFEAPTVSRLERLLRERSALGVRVPLVARERTGREPLSFAQQRLWFLEELEGPGAAYNIPMALRLAGVLDVEALHQALIDVIARHESLRTLIAQDAGTAWQHILPVDDPRTRPGLPLVDIGADALQERLDEAAGRPFDLAADLPVRATVFRLTDNDHILLVVAHHVAFDAMSRVPFIRNVKRAFEARTNGAAPDWRPLPVQYADYAAWQRDVLGTEDDESSELSAQLAYWRTQLASLPAELALPTDRARPAVASYEGGKVEFTVPAGVYDGLVALARAEGVTVFMVVQAALAALLSRLGAGDDIPIGTPIAGRTDQATEDLIGFFVNTLVLRTDVSGDPTFAELLARVRATDLDAYAHQDIPFERLVEAVNPERSLARHPLFQVMLTFDNTIDREVTEGFAGLGVEGLPLGAGAVKFDLLFGLSEVGGELRGAVEYRCDLFDHPTVAQLAERLVRVLERVASDASVRTGELPVVGEAERARVLTEWNDTGVPGVPETFLELFEAQVAARGDAPAVVYEGEVLSYRELDARANRLAGLLVGRGAGPEHFVGVALPRGLDLIVALLAVLKSGAAYVPLDPEYPAERLVHMVTDAAPVVVVTSTDVRTLRTVPRVELDDEATRATLVAAPATGPDVKMSASHPAYVIYTSGSTGRPKGVVISHGSLANFLAWAREDLGAERLRHVVLSTSLSFDVSVVELFAPLSCGGTVEIVRNLLALVDRPGRWSASLVSGVPSAFAQLLEAGLDRADVGMIALAGEALSARDVRRVRAVLPGARVANFYGPTEATVYATAWYGDTPMDAAAPMGRPLRNTCVYVLDDGLRVVPVGVVGELYVAGVGLARGYLGRVGLTAERFVACPFGARGERMYRTGDLVRWRVDGTLEFVGRADDQVKVRGFRVELGEVEGAVAAHPDVVRAVVVVREDRPGDHRLVAYVTGVDTGGLSSAVMRAVAERLPAYMVPSAVVVLDEIPLTPNGKVDRAGLPVPVVSVAGFCAPSSPREEVLCGLFAEVLGVERVGVDDGFFDLGGDSILSIQLVARARRAGLELSVRDVFEGRTVRALAAVVRGSDAGAVGVVGGAEIVLPGVGEVERWPVVEWLAERGGGSLGGVVRGFNQSVVLAVPAGLVWEELRVLLGAVRDRHEAWRLRVLDSGALCVDGVVPDDGSWIVRCDLSGMGVDGQVDAVRAAAVEARAWLDPSVGRVVRAVWLERGGDRSGVLVLVAHHLVVDGVSWRVVLGDLAEGWAQVRSGGRVELGVVGTSLRGWAAALAEQGRRGERAGEVELWSRMVRGADVLVGSRAVDGAVDVFGGVVSVDSRASVSVSRALLTEVPSVLGVGVQEVLLAAFGLAVARWRGRGGPVVVDVEGHGRNEDAVRGADLSRTVGWFTSVYPVRVPVESASWDEVRAGGPVVGRVVREVKETLRSLPDQGLGYGILRYLDPEHGPALARHATPQFGFNYLGRFTTGTDDTGDEGMTDWVPVSGPFAVGAGQDPELPVAHAVEFNAITLDTPEGPRLGVTWSWPTTLLPESRIRELARYWDEALEGLVEHARHPEAGGLTPSDVTLVEVNQVELDRLQAGVAGGAEEILPVSALQEGLLFHSALASGGVDVYVGQLVFDLVGPVDVDRLRAAVEGLVARHGVLRSGYRQLRSGEWVAVVARQVDLPWQSIDVRDGGIDGLVEEERWRRFDMGRGPLARFVLIRTHDDRFRFVITYHHVVLDGWSVPVLLRELLALYGSSGDVSVLPGVRSYGDFLRWVAARDAAAAEGAWRRALTGLEEPSLVAPGVSRDGVVPAAFHGAVDGDLSQKIVAWARGRGVTVASVVQAAWALVLGRLMGRDDVVFGVTVSGRPAEVVGVEDMVGLFVNTIPLRARLDPAESLGGFVERLQREQTELLEHQHVRLAEVQRWAGHKELFDVGMVFDNYPVSSESPEAEFQISRTGGYNGTHYALNLVASMHGLELELEIGYRPDVFDAGRVREVWGWLVRVLEGVVSGGGGVSVSGVDVLGVGERERLLGWGVGGPVPVVPGGGLVGLFEERVRADADAVAVRGAGVVWSYGELNARVNVVARWLVGRGVGAECGVGVVMGRGVDVVVMLLAVAKAGGFYVPVDPEWPVERVGWVLADAGVGLVVVGEGLSHVVGDFPGGEVFEFSRVVRESCLVELVAADGVEVRNVTDGERASRLLPGHPLYVVYTSGSTGRPKGVVVTHASVGGYLARGRDVYAGAVGGVGFVHSSLAFDLTVTVLFTPLVSGGCVVLGELDESAQGVGASFVKVTPSHLGLLGELEGVVAGNGMLLVGGEALSGGALREWRERNPGVVVVNAYGPTELTVNCAEFLIAPGEEVPDGPVPIGRPFAGQRMFVLDAALRVVPVGVVGELYVAGVGLARGYLGRVGLTAERFVACPFGVPGERMYRTGDLVRWRVDGALEFVGRADDQVKVRGFRVELGEVEGAVAAHPDVVRAVVVVREDRPGDHRLVAYVTAGGVGGDGLRSAISGLVAERLPAYMVPSAVVVLDEIPLTPNGKVDRAALPVPEVEAGTGYRAPVSPREEVLCGLFAEVLGVERVGVDDDFFELGGHSLLATRLISRVRAVLGVEAGVRALFEAPTVSRLERLLRERSGLGVRVPLVARERTGREPLSFAQQRLWFLEELEGPGAAYNIPMALRLAGVLDVEALHQALIDVIARHESLRTLIAQDAGTAWQHILPVDDPRTRPGLPLVDIGADALQERLDEAAGRPFDLAADLPVRATVFRLTDNDHILLLVLHHIAGDGWSMGPLARDLSTAYSARAAGAASAWRPLSVQYADYAAWQRDVLGTEDDESSELSAQLAYWRTQLASLPAELALPTDRARPAVATYRGGRIEFTIPADVHRSLADLARAEGVTVFMVVQAALAALLSRLGAGDDIPIGTPIAGRTDQATEDLIGFFVNTLVLRTDVSGDPTFAELLARVRATDLDAYAHQDIPFERLVEAVNPERSLARHPLFQVMLAFNNAETSTPLPMAEGLAASRQDIEPGVAKFDLALYCNESRGETGDHQGIRSVFEYRRDLWDEDTVRQLADRFLHVLAAFAAAPEQRASSVDVLRAGERDQLLHEWNDTAAALPPALLPQLFEEQVRRTPHDVALVSGNIRLTYAELDARANRLAHLLLARGAAPETFVAVALPRTEELLVALLAVQKTGAGHLPLDPGFPAERLSYMLDDARPAVVLTTEDISARIPGGSHVVLDSEQVTGELHDHPATSPAGRGNPAGPAYVIYTSGSTGQPKGVVVPSAALVNFLADMVPRLGLRGGDRLLSVTTVGFDIAALELFVPLLSGATVVLADGETVRDPALARQTCEDHGVTMVQATPSWWHGMLADAGDSLRGVHAVVGGEALSPGLRDALTRGARSVTNMYGPTETTIWSTSAGQAAGDSAPPSIGTPILNTRVYVLDAALCVVPPGVAGELYIAGDGLARGYLGRAGLTAERFVACPFGAPGERMYRTGDLVRWRVDGALEFVGRADDQVKVRGFRVELGEVEGAVAAHPDVVRAVVVVREDRPGDHRLVAYVTGVDTGGLSSAVMRAVAERLPAYMVPSAVVVLDEIPLTPNGKVDRAALPVPGVEAGAGYRAPVSPREEVLCGLFAEVLGVERVGVDDDFFGLGGHSLLATRLISRVRAVLGVEAGVRALFEAPTVSRLERLLRERSGLGVRVPLVARERTGREPLSFAQQRLWFLEELEGPGAAYNIPMALRLAGVLDVEALHQALIDVIARHESLRTLIARDSDGTARQQVLPVGDPAARPALPVVQTDADTLVAKLNEAVGRPFDLTAEMPLRATVFRVADEDHALLLVFHHIAGDGWSTGLLARDLSTAYAARLEGRDPQLPPLPVQYADYAAWQRDVLGTEDDESSELSAQLAYWRTQLADLPAELALPADRVRPARASYEGGRVGFTVPAGVLRDLTRLARVEGVTVFMVVQAALAALLSRLGAGDDIPIGTPIAGRTDQATEDLIGFFVNTLVLRTDVSGDPTFAELLARVRATDLDAYAHQDIPFERLVEAVNPERSLARHPLFQVMLAFDNTADGGPVEDFPGLSAAGLPLGAGAAKFDLLFGLSEVGGELRGAVEYRCDLFDHPTAARIAERLVRVLERVAADASVRLGELPVVSDAERACVLTEWNDTAVPGVTGTLSALFEARAAARGDAPAVVYEGEELSYRELNTRANRLAHVLAEHGAGPERFVGVALPRSPDLVVALLAVVKSGAAYVPLDPEYPADRLAYMAGDAAPVAVLTRGDVELPGSVPRIGLDDTEIRATLATAPGTNPGTPVTEAHPAYMIYTSGSTGRPKGVVVSHGAIVNRLAWMQAEYRLDATDRVLQKTPAGFDVSVWEFFWPLLEGAVLVFARPGGHRDAAYLAGLIERERITTAHFVPSMLRVFLEEPGAALCTGLRRVICSGEALGTDLAVDFRAKLPVPLHNLYGPTEAAVDVTHHAYEPATGTATVPIGRPIWNIRTYVLDAALRPVPPGVPGELYLAGAGLARGYHGRPALTAERFVACPFGVPGERMYRTGDLVRWRVDGTLEFVGRADDQVKVRGFRVELGEVEGAVAAHPDVVRAVVVVREDRPGDHRLVAYVTVGGVGGDGLRSAISGLVAERLPAYMVPSAVVVLDEIPLTPNGKVDRAGLPVPVVSVAGFCAPSSPREEVLCGLFAEVLGVERVGVDDGFFDLGGDSILSIQLVARARRAGLELSVRDVFEGRTVRALAAVVRGSDAGAVGVVGGAEIVLPGVGEVERWPVVEWLAERGGGSLGGVVRGFNQSVVLAVPAGLVWEELRVLLGAVRDRHEAWRLRVLDSGALCVDGVVPDDGSWIVRCDLSGMGVDGQVDAVRAAAVEARAWLDPSVGRVVRAVWLERGGDRSGVLVLVAHHLVVDGVSWRVVLGDLAEGWAQVRSGGRVELGVVGTSLRGWAAALAEQGRRGERAGEVELWSRMVRGADVLVGSRAVDGAVDVFGGVVSVDSRASVSVSRALLTEVPSVLGVGVQEVLLAAFGLAVARWRGRGGPVVVDVEGHGRNEDAVRGADLSRTVGWFTSVYPVRVPVESASWDEVRAGGPVVGRVVREVKETLRSLPDQGLGYGILRYLDPEHGPALARHATPQFGFNYLGRFTTGTDETTTADALDRAPAWSLLARSAAGQDPELPVAHAVEFNAITLDTPEGPRLGVTWSWPTTLLPESRIRELARYWDEALEGLVEHARHPEAGGLTPSDVGLAELSFAEIELLEDDWRTQG

SEQ ID NO: 12 - DNA, 22017 bp, Streptomyces roseosporus
gtgaaccgccggtcgaaggtagtcgaggagatcctgcctgtctcggcgctccaggaaggactgctgttccacagctccttcgccgccgccgacggagtcgacgtgtacgcgggacagctcgcgttcgacctggtcggcgcggtggacaccggtcggctgcgggccgccgtcgaaagcctcgtggcgcggcacggcgtcctgcgctcaagctaccgtcaggcgcgctccggggagtgggtcgcggtcgtggcgcggcgcgtcgcgacgccatggcgcgccgtcgacgcccgcgacggtgccacggacgctgccgccgtggcccgggaggaacgctggcgcccgttcgacctgggccgggccccgctggctcggttcgtgctcgtacggaccgacgacgaccgtttccggttcgtgatcacgtaccaccacgtcatcctcgacggctggtcgctgccggtactgctgcgcgaactccttgccctgtacggaagcggcgccgacccgtcggtgctgccgcccgtccgcccctacggcgactttctccggtgggccgccgcgcgcgacgacgccgccgccgaaaccgcctggcgcgacgcgctcaccggcctggacgagccctccctggtcgcacccggcgcttcccccgacggcgtcgtgccggcctccgtccacgccgaactcgacaaggccggcaccgagaacctcgccgcctgggccaggcaccgcggcatcacccaggccaccgccgtccgcgccgcgtgggccctcgttctcggccagcacaccggccgcgacgacgtcgtgttcggcgtcaccgtctccggacggcccgccgaactcgccggcgccgagcacatggtcggactcttcatcaacaccgtccccctgcgcacggtcctcgaccccgccgacaccctcggcacgttcgccgctcgcctccaggccgaacagaccaccctcctcgaacaccagcacgtgcggctctccgacatccagcgctgggccggacacaaagaactcttcgacaccattgtcgtcttcgagaactaccccatcggccacagcggccccggctccatccgcaccgacgacttcaccgtcaccgccaccgaaggctccgacgccacccactaccccctcaccctcaccgccgtacccggcgaaaccctgcgcctcaagctcgaccaccgccccgacctcgtcgacaccaccaccgccaccgccctgctgcgccgcgtgacccgcgtcctggaaaccgccaccgacgacaccgggcacaccctcgcccgcctcgacctcctcgacgacgacgaacgccaccgcctgctgcgcggctggaacgacaccacgcgcgagcagccgcccacctactaccaccaggaattcgaggaacaggcgcggaggcggccccacgacacggcccttgtcttcaccagcacctcctggacgtacgaagaactcaacgaccgcgccaaccggctcgcccgcctgctcgtcgccgccggcgccggctccgacgacttcgtcgcgctcgccttcccccgttccgcggaatccgtcgtcgccatcctcgccgtactcaaagcgggcgccgcctacctgccgctcgacatggaccagcccgccgaacggctcaccggcatcctcgccgacgcacacccgaccgtcgtcctcacgaccaccaccgccaccccgctgccgcaccccggccgcaccctcgtcctcgacagccccaccaccgcccgcgccctcgctgcggcacccgcacacaacctcaccgacgccgaccgccgtaccccgctcaacgcccgcaacgccgcctacatcatccacacctccggctccaccggacgccccaagggcgtcgtcatcgaacaccgcagtctcgccaacctcttccacgaccatcggcgcgccctcatagaaccccatgccgccggaggatcacggctcaaggccggcctcaccgcctccctctccttcgacacctcctgggaaggtctgatctgcctggccgccggccacgaactgcaccttattgacgacgacacccgccgagacgccgaacgcgtcgccgaactcatcgaccggcagcgcatcgacgtcatcgacgtcaccccctccttcgcccagcaactcgtagagaccggaatcctcgacgagggccgccaccaccccgccgccttcatgctcggcggtgaaggcgtcgacgcgaaactctggaccaggctctccgacgtccccggcgtcacctcgtacaactactacggccccaccgaattcaccgtcgacgccctcgcctgcacggtcggcatcgcaccccgccccgtcatcggccaccccctcgacaacacggccgcctacatcctcgacggcttcctgcgtcccgtacccgaaggcgtcgccggcgagctctacctcgccggcacccagctcgcccgcggctacgccggccggcccggcctgacggccgaacgcttcgtggcctgccccttcggcgcgccgggcgaacgcatgtaccgcaccggcgacctcgtccggcgcagtcccggcggcgtggtcgaatacctcggacgcgtggacgatcagatcaaactccgcggcttccgcatcgaacccgccgagatcgagctcgccctggccggccaccccgccgtcgcccagaacgtcgtcctcctgcaccgctccgccaccggagaggctcgcctcgtggcgtacgtcgtccccggcacacccgtcgacccgcgggaactcaccgggcacctcgccgcccggctgcccgcgtacatggtgccctcggctttcgttctcctcgacaccctcccgctcacccccaacggcaaactggaccgcggcgccctgccggagcccgccttcggtaccgcgccccgccccgagcgcccccgcacacccgtcgaggagatcctctgcggcctgtacgccgacgtgctcgggcttccctcgttcggcgccgacgacgacttcttcgacgccggcgggcactcgctgctggccagcaaactcgtcagccgtatccgtacgaacctgaaaaccgaactcaacgtccgcgccctcttcgagcaccgcacggtctcctccctggccaccgccctccaccgggccgcgcaggccggccccgcgctcaccgccggaccgcgccccgcacggatcccgctgtcgtacgcccagcgccgcctgtggttcctcaaccggctcgaccgcgacagcgccgcgtacaacatgcccgtcgcactccgcctgcgtggccccctggacagcaccgccatgtgcgccgcactcaccgacgtcgccgaacgccacgaggcgctgcgcaccgtgttcgaggaggaccgggacggtgcccaccagatcgtgctgcccgcgaccggcctcggccctctgctcaccgtgaccggggccgacgggacgaccctgcgtgccctcatcaccgagttcgtacgcaggcccttcgacctggcggcggagatccccttccgcgccgcactgttccgcgtcggcgacgaggaacatgtactggtcgtcgtcctgcaccacatcgccggggacggctggtccatgggaccgctcgcacgcgacgtggccgaggcctaccgggcgcgggcggccgggagggcacccgactgggaaccgctgcccgtgcagtacgccgactacgcgctctggcagcgggaggtgctgggcgcggaggacgacgagaccggcgaactctccgcccaactcgcccactggcgcacccgcctcgcaggggcccccgcagaactcacgctgcccaccgaccgcccacgccccgctgtcgcctccaccgccggagaccgcgtcgaattcaccgtgcccgccggactccaccaggccctcgccgacctggcacgggcccacggcgcgacggtcttcatggtcgtccaggccgccctcgccgtcctgctgtcacgtctcggcgccggcgacgacatccccatcggcaccccggtcgccggccgcaccgacgaggccacggaggaactgatcgggttcttcgtcaacacgctggtgctgcgcaccgacgtgtccggcgacccgacgttcgccgaactcctcgcgcgggtgcgggccaccgacctcgacgcgtacgcacaccaggacgtgccattcgaacgtctggtcgaggtgttgaacccggagcggtcactggcacggcatccactgttccaggtcatgctgacgttcaacgtcccggacatggacggggtcggaagcgcgctggggaatctgggggaactggaggtctccggtgaggccatccggacggatcagaccaaggtggatctcgctttcacgtgcacggagatgtacgccgcggacggtgcggcctcgggaatgcgcggggtgctggaataccggcttgatgtgttcggtgcggtacaggcccgggaaacgacggagcggttggtgcgggtgttggagggtgtggtttctggtgggggtggggtgtctgtgtcgggggttgatgtgttgggtgtgggtgagcgggagaggttgttggggtggggtgtgggtgggccggtgcctgtggtgccgggtggtgggttggtggggttgttcgaggagcgggtgcgggccgacgcggacgcggtggccgtgcgtggcgcgggggtggtgtggagttatggggagttgaatgcgcgggtgaatgtggtggcgcggtggttggtgggtcggggtgtgggggcggagtgtggtgtgggtgtggtgatgggccgcggggtggatgtggtggtgatgttgctggcggtggcgaaggcgggtgggttttatgtgccggtggatccggagtggccggtggagcgggtggggtgggtgctggcggatgccggggtggggctggttgtggtgggggaggggttgtcgcatgtggtgggggattttcctgggggtgaggttttcgagttttcgcgggttgttcgtgagtcgtgtcttgtggagttggtggctgcggatggggttgaggttcggaatgtgacggatggtgagcgggcgtcgcgtctgttgccggggcatccgttgtatgtggtttatacgtcgggttcgacggggcggccgaagggtgttgtggtgacgcatgcttcggtgggtgggtatttggcgcgtggtcgggatgtgtatgcgggtgccgttggtggtgtggggtttgtgcattcgtcgcttgcgttcgatctgacggtgacggttctgttcacgcctttggtgtctggcggttgtgttgtgttgggtgagttggacgagtcggcgcagggggtgggtgcctcgttcgtgaaggtgactccgtcgcatctgggtttgctgggtgagctggagggtgtggtggcggggaacggcatgctgctggtggggggtgaggcgttgtcgggtggtgcgctgcgtgagtggcgtgagcgtaatccgggtgtggtggtggtgaatgcttatggtccgacggagctgacggtgaactgtgccgagttccttatcgcgcctggtgaggaggttccggatgggcctgtgccgatcgggcgtcctttcgcgggtcagcggatgtttgttctggatgcggcgctgcgggtggtgccggtcggtgtggtgggtgagttgtatgtggcgggtgtgggtctggcgcggggctatctcgggcgtgcgggtctgacggcggagcggttcgtggcctgccccttcggtgcgccgggtgagcgtatgtaccgtacgggggatctggtgcggtggcgggtggacggcgcgcttgagtttgttggtcgtgcggatgatcaggtgaaggtccgtggtttccgtgtggagttgggtgaggtggagggtgctgttgcggcgcatcctgatgtggtgcgtgcggttgttgtggtgcgtgaggaccggccgggtgatcaccggttggttgcgtatgtcaccggtgttgacacgggtggactgtcctctgcggtgatgcgtgccgttgctgagcgtctgcctgcgtacatggtgccgtcggcggtggtggttctggatgagatcccgttgacgccgaatgggaaggtggaccgggcggcgcttccggtgccgggggtggaggcgggcgcgggctaccgggcgcctgtttcgccgcgggaggaggtgttgtgtggtctgttcgcggaggtgctggggctggagcgggtgggggtggacgatgatttcttcgggttgggtggtcattctcttctggcgactcgtctgatttcgcgtgtccgtgcggtgttgggtgttgaggcgggtgtgcgggcgttgttcgaggcgccgacggtgagccgtttggagcggttgctgcgggagcggtcggctttgggggtgcgggtgcctctggtggcacgggagcggacgggtcgggagccgttgtcgttcgctcagcagcgtctgtggttccttgaggaactggaagggcccggtgctgcgtacaacattccgatggcgctgcgtctggccggtgttctggacgtcgaagcgctgcaccaggcgctcattgatgtcatcgcccgccacgaaagcctccgcaccctcatcgcgcaggatgcgggtactgcctggcagcacatcctgcccgttgacgaccctcgcacccgtcccggtctccctcttgtggacatcggtgccgacgcccttcaggagcggctcgacgaagccgccggccggcccttcgatctcgcggccgatctcccggtccgggccacagtcttccgcctcaccgacaacgaccacatcctcctggtcgtggcccatcacgtggccttcgacgcgatgtcccgtgtgccgttcatccggaacgtcaagcgcgccttcgaggcccgtacgaacggcgcggcccccgactggaggccgctgcccgtgcagtacgcggattatgcggcctggcagcgcgacgtactcggcacggaggacgacgagtcgagcgagctgtcggcccagctcgcctactggcgcacccaactagcctcactaccggccgagttggcgctcccgacggaccgggcccggcccgccgtcgcctcgtacgaaggcggcaaggtcgagttcaccgtccccgccggggtgtatgacggcctggtggctctcgcccgtgccgagggtgtcacggtcttcatggtcgtgcaggcggcgctggccgcgctcctctcccggctcggcgccggcgacgacatccccatcggcaccccgatcgccggccgcaccgaccaggccaccgaagatctcatcggcttcttcgtgaacaccctcgtcctgcgcaccgacgtgtccggcgacccgacgttcgccgaactcctcgcgcgcgtccgggccaccgacctcgacgcctacgcccaccaggacatccccttcgaacgactggtcgaagcggtcaaccccgagcgctccctcgcccgccaccccctcttccaggtcatgctgaccttcgacaacacgattgaccgtgaggtcacggagggcttcgcgggcctcggggtggaaggcctgccgctgggtgcgggagcggtcaaattcgatctgctcttcggtctctccgaggtgggcggcgagctgcgcggagccgtggagtaccgctgcgatctcttcgaccacccgacggtggcgcagctcgcggagcgcctggtgcgggtactggagcgcgtggcttccgacgcttcggtacgcacgggtgaactgccggtcgtcggcgaggcggagcgcgcccgtgtcctgacggagtggaatgacacgggcgtccccggtgtgccggaaacattcctggagttgttcgaggcgcaggtcgcggcccggggtgacgcgccggcggtcgtgtacgagggtgaggttctgtcgtaccgggaactcgacgcgcgggcgaaccgcctggccgggctgctggtggggcgcggtgcgggcccggagcatttcgtgggggtggcgctgccgcgtgggctggatctgatcgtggccctgctggccgtgctcaagtccggtgccgcgtacgttcccctggacccggagtacccggccgagcggctggtccacatggtcaccgacgccgcccccgtcgtggtcgtgacctccaccgacgtacgtactctgcggaccgttccccgggtcgagctggacgacgaggcgacccgcgccaccctggtcgcagcccccgccacagggcccgacgtgaagatgtccgcctcccaccccgcgtacgtgatctacacctccgggtccacgggccgccccaagggcgtcgtcatcagccacggcagcctggccaacttcctcgcctgggcgcgggaagacctgggtgccgagcggctccggcacgtcgtgttgtccacgtccctcagcttcgacgtctccgtggtcgaactcttcgccccgctgtcctgcggcggcaccgtcgagatcgtccggaatctgctggccctcgtcgaccgccccggccgatggtccgcgagcctggtcagcggcgtgccgtcggccttcgcgcagctgctggaagccggcctcgaccgggccgacgtgggcatgatcgccctggccggcgaggcgctgtccgctcgcgacgtgcgccgcgtccgcgctgtgctgcccggggcccgcgtggccaacttctacggcccgaccgaagccaccgtctacgccacggcctggtacggcgacacccccatggacgccgcggcccccatgggccggcccctgcgcaacacgtgtgtgtatgtgctggacgacgggctgcgcgtggtgccggtcggtgtggtgggtgagctgtatgtggcgggtgtgggtctggcgcggggctatctcgggcgtgtgggtctgacggcggagcggtttgtggcgtgtccgttcggtgcgcggggtgagcgtatgtatcgcacgggggatttggtgcggtggcgggtggacggcacgcttgagtttgttggtcgtgcggatgatcaggtgaaggtccgtggtttccgtgtggagttgggtgaggtggagggtgctgttgcggcgcatcctgatgtggtgcgtgcggttgttgtggtgcgtgaggaccggccgggtgatcaccggttggttgcgtatgtcaccggtgttgacacgggtggactgtcctctgcggtgatgcgtgccgttgctgagcgtctgcctgcgtacatggtgccgtcggcggtggtggttctggatgagatcccgttgacgccgaacgggaaggtggaccgggcgggtcttccggtgccggtggtgtcggtggcggggttctgtgcgccgtcgtcgccgcgggaggaggtgttgtgtggtctgttcgcggaggtgctgggtgttgagcgggtgggggtggacgatgggttcttcgatctgggcggggacagcattctgtcgattcagttggtggcgcgggctcgtcgggcgggtctggagttgtcggttcgggatgttttcgagggccgtacggtacgtgctctggcggctgtggtgcgtggttcggacgctggggcggttggtgtggtggggggtgctgagattgtgctgccgggtgtgggtgaggtggagcggtggccggtggtggagtggctggcggagcgtggtggggggtcgctgggtggtgtggttcggggtttcaatcagtctgttgtgcttgctgtgcctgctgggttggtgtgggaggagttgcgggtgttgttgggtgcggtgcgggatcggcatgaggcgtggcggttgcgggtgctggattccggggcgttgtgtgttgatggtgttgttccggatgacgggtcgtggattgtccggtgtgacctgagcggtatgggtgtggatggtcaggtggatgctgtgcgggctgcggctgtggaggcgcgtgcgtggctggatccgtcggtgggccgggtggtgcgggcggtgtggctggagcgtggtggtgatcgttcgggggtgttggtgctggtggcgcatcacctggtggtggacggtgtgtcgtggcgggtggtgctgggggatctggcggaggggtgggcgcaggtgcgttcgggtggccgtgtggagttgggtgtggtggggacgtcgttgcggggttgggcggcggcgttggcggagcagggccggcggggcgagcgtgcgggggaggtggagttgtggtcgcggatggttcggggtgcggatgttctggtggggtcgcgtgctgtggatggtgcggtggatgttttcggcggggtggtgtcggttgattcgcgggcgtcggtgtcggtgtcgcgtgcgttgctgacggaggtgccgtcggttctgggtgttggtgtgcaggaggtgttgctggcggcattcgggctggcggtcgcgcggtggcgcggccggggtgggccggttgtggtggatgttgaggggcacgggcgtaatgaggacgctgtgcggggtgctgatctgtctcgtactgtcggttggttcaccagtgtgtatccggtccgtgtgccggtggagtccgcttcgtgggacgaggtgcgtgcgggtggtccggtggtgggccgtgtggtgcgtgaggtgaaggagactctgcgttcgctgcctgaccagggtctgggttatggcatcctgcgctatctcgatcccgagcacggtcctgctctggcccggcatgccaccccgcagttcggtttcaactacctcggccgcttcaccaccggaaccgacgacaccggtgacgaggggatgacggactgggtccccgtgtcagggccgttcgcggtgggagccggccaggaccccgaactgcccgtggcgcacgcggtcgagttcaacgcgatcacgctggacaccccggagggcccgcgcctgggcgtgacatggtcgtggccgacgacgctgctgccggagtcccggatacgggagctggcccgctactgggacgaggccctggaagggctggtcgaacacgcccggcaccccgaagccggcggcctcacgccgtccgacgtgacgctggtggaagtgaaccaggtggagctcgaccgtctgcaggcgggggtcgccggtggtgcggaggagattctgccggtgtcggccctgcaagaggggctgctgttccacagcgcgttggcctctggtggggtggacgtgtatgtggggcagctggtgttcgatctggtcggtccggtggacgtcgaccggctgcgcgcggctgtcgaaggtctggtggcgcggcacggggtgctgcggtcgggataccgccaactgcggtcgggcgaatgggttgcggtcgtcgcacgacaggtggatctgccgtggcagtccatcgacgtgcgcgacggcggtatcgacgggttggtggaagaggagcgctggcgccggttcgacatgggccggggtccactggcgcgcttcgtgctcatccggacgcacgacgatcgtttccggttcgtcatcacgtaccaccacgtcgtcctcgacggctggtccgtcccggtgctgctgcgtgagctgctggccctgtacggcagctcgggggacgtatcggttctgccgggggtccgctcgtacggcgatttcctgcgatgggtcgccgcgcgagacgccgcagccgccgaaggcgcatggcggcgggcgctgacgggcctggaggagccgtcgctcgtcgcgccaggcgtttcccgagacggggtcgtcccggcggcgttccacggtgcggtcgacggcgacctctcgcagaagatcgtggcgtgggcgcgcgggcgtggtgtgacggttgcgtcggtggtacaggcggcgtgggccttggtgctggggcggttgatgggtcgggacgatgtggtgttcggggtgacggtgtcgggtcggcctgccgaggtggtgggtgtggaggacatggtcggtctgttcgtgaacaccattccgttgcgggcgcggctggatccggcggagtcgctgggtggtttcgtggagcggctgcagcgggagcagacggagctgctggagcatcagcatgtccggctggcggaagtccagcggtgggccgggcacaaggaactcttcgatgtcggaatggtcttcgacaactacccggtttcttctgaatccccggaagcggaattccagatctcacgaacaggcggatacaacggaacccactacgcactgaacctcgttgcttccatgcacggcctggagctggaactggaaatcggttatcggccggatgtgtttgatgcgggtcgggtgcgtgaggtgtggggatggttggtgcgggtgttggagggtgtggtttctggtgggggtggggtgtctgtgtcgggggttgatgtgttgggtgtgggtgagcgggagaggttgttggggtggggtgtgggtgggccggtgcctgtggtgccgggtggtgggttggtggggttgttcgaggagcgggtgcgggccgacgcggacgcggtggccgtgcgtggcgcgggggtggtgtggagttatggggagttgaatgcgcgggtgaatgtggtggcgcggtggttggtgggtcggggtgtgggggcggagtgtggtgtgggtgtggtgatgggccgcggggtggatgtggtggtgatgttgctggcggtggcgaaggcgggtgggttttatgtgccggtggatccggagtggccggtggagcgggtggggtgggtgctggcggatgccggggtggggctggttgtggtgggggaggggttgtcgcatgtggtgggggattttcctgggggtgaggttttcgagttttcgcgggttgttcgtgagtcgtgtcttgtggagttggtggctgcggatggggttgaggttcggaatgtgacggatggtgagcgggcgtcgcgtctgttgccggggcatccgttgtatgtggtttatacgtcgggttcgacggggcggccgaagggtgttgtggtgacgcatgcttcggtgggtgggtatttggcgcgtggtcgggatgtgtatgcgggtgccgttggtggtgtggggtttgtgcattcgtcgcttgcgttcgatctgacggtgacggttctgttcacgcctttggtgtctggcggttgtgttgtgttgggtgagttggacgagtcggcgcagggggtgggtgcctcgttcgtgaaggtgactccgtcgcatctgggtttgctgggtgagctggagggtgtggtggcggggaacggcatgctgctggtggggggtgaggcgttgtcgggtggtgcgctgcgtgagtggcgtgagcgtaatccgggtgtggtggtggtgaatgcttatggtccgacggagctgacggtgaactgtgccgagttccttatcgcgcctggtgaggaggttccggatgggcctgtgccgatcgggcgtcctttcgcgggtcagcggatgtttgttctggatgcggcgctgcgggtggtgccggtcggtgtggtgggtgagttgtatgtggcgggtgtgggtctggcgcggggctatctcgggcgtgtgggtctgacggcggagcggtttgtggcgtgtccgttcggtgtgccgggtgagcgtatgtatcgcacgggggatttggtgcggtggcgggtggacggcgcgcttgagttcgttggccgtgcggatgatcaggtgaaggtccgtggtttccgtgtggagttgggtgaggtggagggtgctgttgcggcgcatcctgatgtggtgcgtgcggttgttgtggtgcgtgaggaccggccgggtgatcaccggttggtggcttacgtgactgcgggtggtgttggtggggatggtcttcgttccgcgatctctggtttggtggctgagcgtctgcctgcgtacatggtgccgtcggcggtggtggttctggatgagatcccgttgacgccgaacgggaaggtggaccgggcggcgcttccggtgccggaggtggaggcgggcacgggctaccgggcgcctgtttcgccgcgggaggaggtgttgtgtggtctgttcgcggaggtgctgggtgttgagcgggtgggggtggacgatgacttcttcgagttgggtggtcattctcttctggcgactcgtctgatttcgcgtgtccgtgcggtgttgggtgttgaggcgggtgtgcgggcgttgttcgaggcgccgacggtgagccgtctggagcggttgctccgggagcggtcgggtttgggggtgcgggtgcctctggtggcacgggagcggacgggtcgggagccgttgtcgttcgctcagcagcgtctgtggttccttgaggaactcgaagggcccggtgctgcgtacaacattccgatggcgctgcgtctggccggtgttctggacgtcgaagcgctgcaccaggcgctcattgatgtcatcgcccgccatgaaagcctccgcaccctcatcgcgcaggatgcgggtactgcctggcagcacatcctgcccgttgacgaccctcgcacccgtcccggtctccctcttgtggacatcggtgccgacgcccttcaggagcggctcgacgaagccgccggccggcccttcgacctcgcggccgatctcccggtccgggccacagtcttccgcctcaccgacaacgaccacatcctcctgctggtcctgcaccacatcgccggcgacggctggtcgatgggcccgctcgcccgcgatctctccacggcgtacagcgcacgcgccgcaggagccgcctcggcctggcggcccctctccgtgcagtacgcggattatgcggcctggcagcgcgacgtactcggcacggaggacgacgagtcgagcgagctgtcggcccagctcgcctactggcgcacccaactagcgtcactcccagccgagttggcgctcccgacggaccgggcccggcccgccgtcgccacctaccggggcggacgcatcgagttcaccatccccgccgacgtccaccgcagcctcgccgacctcgcccgtgccgagggtgtcacggtcttcatggtcgtgcaggcggcgctggccgcgctcctctcccggctcggcgccggcgacgacatccccatcggcaccccgatcgccggccgcaccgaccaggccaccgaagatctcatcggcttcttcgtgaacaccctcgtcctgcgcaccgacgtctccggcgacccgacgttcgccgaactcctcgcgcgcgtccgggccaccgacctcgacgcctacgcccaccaggacatccccttcgaacgactggtcgaagcggtcaaccccgagcgctccctcgcccgccaccccctcttccaggtcatgctcgccttcaacaacgccgagacgagcaccccgctgcccatggccgaaggcctggctgcctcccggcaggacatcgaaccgggcgtggcgaaattcgatctggccctgtattgcaacgaatcccgcggtgagacgggcgaccaccagggcatcagaagtgtcttcgagtaccgccgcgacctgtgggacgaggacaccgtgcggcagctcgccgaccggttcctgcatgttctcgctgcttttgcggcagccccggagcaacgtgcgagcagcgtcgacgtgctccgggcgggcgagcgcgaccaactgctgcacgagtggaacgacacggctgccgctctccccccggcactgctgccccagctgttcgaggagcaggtgcggcgcaccccgcacgatgtcgctctcgtctcggggaacatccggctcacgtacgcggagctggacgcgcgcgcgaaccgcctggcccacttgctgctcgcccggggcgcggcccccgagacgttcgtcgcggtggccctgccccggaccgaagagctcctggtggccctgctggccgtacagaaaacaggtgccggacatctgccgctggatcccggcttcccggccgagcggctcagctacatgctggatgacgcccgccctgcggtggtcctcaccacggaggacatcagcgcccgcatacccggcggaagccatgtggtactcgactccgagcaggtgaccggcgagctccacgaccacccggccacgtcccccgccggccggggcaaccccgccggcccggcgtacgtgatctacacctccggatccaccggccagcccaagggcgtcgtcgtaccgtcggccgccctggtgaacttcctggccgacatggtgcccaggctcgggctccgcggtggcgaccgcctgctgtccgtgaccaccgtgggcttcgacatcgcggccctcgagctcttcgtcccgctactgagcggcgccaccgtcgtcctcgcggacggggagacggtccgcgacccggcgctggcccgccagacgtgcgaggaccacggcgtcaccatggtccaggcgacaccgagctggtggcacggcatgctcgccgacgcgggcgacagcctgcgcggcgtgcacgccgtcgtgggcggtgaggccctgagccccgggttgcgcgacgcgctgacacgaggcgcgcggtccgtcacgaacatgtacggcccgacggagacgaccatctggtccaccagcgccgggcaggccgccggggacagcgctcccccttcgatcggcacacccatcctcaacactcgcgtgtatgtgctcgacgctgctttgtgtgtcgtgccaccgggcgtcgcaggcgagctgtacatcgcgggcgacggcctcgcgcggggctatctcgggcgtgcgggtctgacggcggagcggttcgtggcctgccccttcggtgcgccgggtgagcgtatgtaccgtacgggggatctggtgcggtggcgggtggacggcgcgcttgagtttgttggtcgtgcggatgatcaggtgaaggtccgtggtttccgtgtggagttgggtgaggtggagggtgctgttgcggcgcatcctgatgtggtgcgtgcggttgttgtggtgcgtgaggaccggccgggtgatcaccggttggttgcgtatgtcaccggtgttgacacgggtggactgtcctctgcggtgatgcgtgccgttgctgagcgtctgcctgcgtacatggtgccgtcggcggtggtggttctggatgagatcccgttgacgccgaatgggaaggtggaccgggcggcgcttccggtgccgggggtggaggcgggcgcgggctaccgggcgcctgtttcgccgcgggaggaggtgttgtgtggtctgttcgcggaggtgctgggtgttgagcgggtgggggtggacgatgatttcttcgggttgggtggtcattctcttctggcgactcgtctgatttcgcgtgtccgtgcggtgttgggtgttgaggcgggtgtgcgggcgttgttcgaggcgccgacggtgagccgtttggagcggttgctgcgggagcggtcgggtttgggggtgcgggtgcctctggtggcacgggagcggacgggtcgggagccgttgtcgttcgctcagcagcgtctgtggttccttgaggaactggaagggcccggtgctgcgtacaacattccgatggcgctgcgtctggccggtgttctggacgtcgaagcgctgcaccaggcgctcattgatgtcatcgcccgccacgaaagcctccgcaccctcatcgcccgcgacagtgacggcacggcccggcagcaggtgctgcccgtcggtgaccccgccgcgcgaccggctcttccggtcgtacagaccgacgccgacaccctcgtcgcgaaactgaacgaggccgtcggccgccccttcgacctcacggccgagatgcccctgcgtgccaccgtcttccgggtggccgacgaggaccacgcgctgctgctggtgttccaccacatcgccggcgacggctggtcgacgggcctgctcgcccgcgacctgtccaccgcgtacgcagccaggctcgaaggccgggacccccaactgccacccctccccgtgcagtacgcggactacgcggcctggcagcgcgacgtactcggcacggaggacgacgagtcgagcgagctgtcggcccagctcgcctactggcgcacccaacttgccgacctcccagccgagttggccctcccggcggaccgggtccggcccgccagggcctcgtacgaaggaggccgggtcggcttcaccgtccccgccggggtcctccgcgacctcacgcgcctggcccgtgtcgagggtgtcacggtcttcatggtcgtgcaggcggcgctggccgcgctcctctcccggctcggcgccggcgacgacatccccatcggcaccccgatcgccggccgcaccgaccaggccaccgaagatctcatcggcttcttcgtgaacaccctcgtcctgcgcaccgacgtctccggcgacccgacgttcgccgaactcctcgcgcgcgtccgggccaccgacctcgacgcctacgcccaccaggacatccccttcgaacgactggtcgaagcggtcaaccccgagcgctccctcgcccgccaccccctcttccaggtcatgctcgccttcgacaacacggccgacggaggccccgtagaagacttccccggactgtccgcagccgggctgccgttgggtgcgggcgcggcgaagttcgatctgctcttcggtctctccgaggtgggcggcgagctgcgcggagccgtggagtaccgctgcgatctcttcgaccacccgacggccgcacggatcgcggagcgcctggtgcgggtgctggagcgggtcgccgccgacgcgtcggtacgcctgggcgagctgcccgtggtgagcgacgccgagcgggcctgcgtcctgacggagtggaacgacaccgccgtccccggcgtgacgggaacgctgtcggcgctgttcgaggcacgggccgcagcccggggcgacgcgccggcggtcgtgtacgagggtgaagaactgtcgtaccgtgaactgaacacacgcgccaaccgcctcgcccatgtcctggccgagcacggcgcaggccccgagcggttcgtcggtgtggccctgccccgcagtccggacctcgtagtggcactgctggcggtcgtgaaatcgggcgcggcctacgtaccgctcgaccccgagtacccggccgaccggctcgcgtacatggccggcgacgctgcccccgtggcggtcctgacccgcggggacgtcgaactccccgggtccgtcccgcggatcgggctggacgacacagagatccgcgcgacactcgccaccgcccccggcacgaaccccggcacgccggtgaccgaggcccaccccgcgtacatgatctacacctccggatccaccggccgccccaagggcgtcgtcgtctcccacggcgccatcgtcaaccggctcgcctggatgcaggcggagtaccgtctcgacgcgaccgatcgtgtcttgcagaagactccggccggtttcgacgtgtcggtctgggagttcttctggccgctgctcgagggcgcggtcctcgtgttcgcccggcccggcggccaccgggacgcggcgtatctggccggactcatcgagcgcgagcgcatcaccacggcacatttcgtgccctccatgctgcgcgtcttcctcgaagagcccggcgcggcactctgcaccggactgaggcgggtgatatgcagcggcgaggccctcggcacggacctggccgtggacttccgcgcgaaactgcccgtccccctgcacaatctgtacggcccgaccgaagcggctgtcgatgtcacccaccacgcgtatgagcccgccaccggcacggccacggtccccattggccgccccatctggaacatccgcacctacgtcctcgacgccgccctgcgtcctgtgccaccgggcgtgcccggcgagctgtatctggccggcgccggcctggcccgcggctaccacggccgcccggcactgacggcggagcggtttgtggcgtgtccgttcggtgtgccgggtgagcgtatgtatcgcacgggggatttggtgcggtggcgggtggacggcacgcttgagtttgttggtcgtgcggatgatcaggtgaaggtccgtggtttccgtgtggagttgggtgaggtggagggtgctgttgcggcgcatcctgatgtggtgcgtgcggttgttgtggtgcgtgaggaccggccgggtgatcaccggttggtggcttacgtgactgtgggtggtgttggtggggatggccttcgttccgcgatctctggtctggtggctgagcgtctgcctgcgtacatggtgccgtcggcggtggtggttctggatgagatcccgttgacgccgaacgggaaggtggaccgggcgggtcttccggtgccggtggtgtcggtggcggggttctgtgcgccgtcgtcgccgcgggaggaggtgttgtgtggtctgttcgcggaggtgctgggtgttgagcgggtgggggtggacgatgggttcttcgatctgggcggggacagcattctgtcgattcagttggtggcgcgggctcgtcgggcgggtctggagttgtcggttcgggatgttttcgagggccgtacggtacgtgctctggcggctgtggtgcgtggttcggacgctggggcggttggtgtggtggggggtgctgagattgtgctgccgggtgtgggtgaggtggagcggtggccggtggtggagtggctggcggagcgtggtggggggtcgctgggtggtgtggttcggggtttcaatcagtctgttgtgcttgctgtgcctgctgggttggtgtgggaggagttgcgggtgttgttgggtgcggtgcgggatcggcatgaggcgtggcggttgcgggtgctggattccggggcgttgtgtgttgatggtgttgttccggatgacgggtcgtggattgtccggtgtgacctgagcggtatgggtgtggatggtcaggtggatgctgtgcgggctgcggctgtggaggcgcgtgcgtggctggatccgtcggtgggccgggtggtgcgggcggtgtggctggagcgtggtggtgatcgttcgggggtgttggtgctggtggcgcatcacctggtggtggacggtgtgtcgtggcgggtggtgctgggggatctggcggaggggtgggcgcaggtgcgttcgggtggccgtgtggagttgggtgtggtggggacgtcgttgcggggttgggcggcggcgttggcggagcagggccggcggggcgagcgtgcgggggaggtggagttgtggtcgcggatggttcggggtgcggatgttctggtggggtcgcgtgctgtggatggtgcggtggatgttttcggcggggtggtgtcggttgattcgcgggcgtcggtgtcggtgtcgcgtgcgttgctgacggaggtgccgtcggttctgggtgttggtgtgcaggaggtgttgctggcggcattcgggctggcggtcgcgcggtggcgcggccggggtgggccggttgtggtggatgttgaggggcacgggcgtaatgaggacgctgtgcggggcgctgatctgtctcgtactgtcggttggttcaccagtgtgtatccggtccgtgtgccggtggagtccgcttcgtgggacgaggtgcgtgcgggcggtccggtggtgggccgtgtggtgcgtgaggtgaaggagactctgcgttcgctgcctgaccagggtctgggttatggcatcctgcgctatctcgatcccgagcacggtcctgctctggcccggcatgccaccccgcagttcggtttcaactacctcggccgcttcaccaccggaaccgacgaaaccaccacggccgacgccctcgaccgggcccccgcgtggagccttctcgcccgcagcgccgccggccaggaccccgaactgcccgtggcgcacgcggtcgagttcaacgcgatcacgctggacaccccggagggcccgcgcctgggcgtgacatggtcgtggccgacgacgctgctgccggagtcccggatacgggagctggcccgctactgggacgaagccctggaagggctggtcgaacacgcccggcaccccgaagccggcggcctcacgccgtccgacgtgggcctcgcggaactctcctttgctgagatcgaactgctcgaagacgactggaggacacagggatga

SEQ ID NO: 13 - DNA, 15 bp, Artificial Sequence
  Description of Artificial Sequence: Linker
gtcttcaccacgggg

SEQ ID NO: 14 - DNA, 11 bp, Artificial Sequence
  Description of Artificial Sequence: Linker
gtggtgaagac

SEQ ID NO: 15 - protein, 597 aa, Streptomyces roseosporus
VSESRCAGQGLVGALRTWARTRARETAVVLVRDTGTTDDTASVDYGQLDEWARSIAVTLRQQLAPGGRALLLLPSGPEFTAAYLGCLYAGLAAVPAPLPGGRHFERRRVAAIAADSGAGVVLTVAGETASVHDWLTETTAPATRVVAVDDRAALGDPAQWDDPGVAPDDVALIQYTSGSTGNPKGVVVTHANLLANARNLAEACELTAATPMGGWLPMYHDMGLLGTLTPALYLGTTCVLMSSTAFIKRPHLWLRTIDRFGLVWSSAPDFAYDMCLKRVTDEQIAGLDLSRWRWAGNGAEPIRAATVRAFGERFARYGLRPEALTAGYGLAEATLFVSRSQGLHTARVATAALERHEFRLAVPGEAAREIVSCGPVGHFRARIVEPGGHRVLPPGQVGELVLQGAAVCAGYWQAKEETEQTFGLTLDGEDGHWLRTGDLAALHEGNLHITGRCKEALVIRGRNLYPQDIEHELRLQHPELESVGAAFTVPAAPGTPGLMVVHEVRTPVPADDHPALVSALRGTINREFGLDAQGIALVSRGTVLRTTSGKVRRGAMRDLCLRGELNIVHADKGWHAIAGTAGEDIAPTDHAPHPHPA

SEQ ID NO: 16 - DNA, 1794 bp, Streptomyces roseosporus
gtgagtgagagccgctgtgccgggcagggcctggtgggggcactgcggacctgggcacggacacgtgcccgggagactgccgtggttctcgtacgggacaccggaaccaccgacgacacggcgtcggtggactacggacagctggacgagtgggccagaagcatcgcggtgaccctccgacagcaactcgcgccggggggacgggcacttctgctgctgccgtccggcccggagttcacggccgcgtacctcggctgcctgtacgcgggtctggccgccgtaccggcgccgctgcccggggggcgccacttcgaacgccgccgtgtcgcggccatcgccgccgacagcggagccggcgtggtgctgaccgtcgcgggtgagaccgcctccgtccacgactggctgaccgagaccacggccccggctactcgcgtcgtggccgtggacgaccgggcggcgctcggcgacccggcgcagtgggacgacccgggcgtcgcgcccgacgacgtggctctcatccagtacacctcgggctcgaccggcaaccccaagggcgtggtcgtgacccacgccaacctgctggcgaacgcgcggaatctcgccgaggcctgcgagctgaccgccgccactcccatgggcggctggctgcccatgtaccacgacatggggctcctgggcacgctgacaccggccctgtacctcggcaccacgtgcgtgctgatgagctccacggcattcatcaaacggccgcacctgtggctacggaccatcgaccggttcggcctggtctggtcgtcggctcccgacttcgcgtacgacatgtgtctgaagcgcgtcaccgacgagcagatcgccgggctggacctgtcccgctggcggtgggccggcaacggcgcggagcccatccgggcagccaccgtacgggccttcggcgaacggttcgcccggtacggcctgcgccccgaggcgctcaccgccggctacgggctggccgaggccaccctgttcgtgtcgaggtcgcaggggctgcacacggcacgagtcgccaccgccgccctcgaacgccacgaattccgcctcgccgtacccggcgaggcagcccgggagatcgtcagctgcggtcccgtcggccacttccgcgcccgcatcgtcgaacccggcgggcaccgtgttctgccgcccggccaggtcggcgagctggtcctccagggagccgccgtctgcgccggctactggcaggccaaggaggagaccgagcagaccttcggcctcaccctcgacggcgaggacggtcactggctgcgcaccggcgatctcgccgccctgcacgaagggaatctccacatcaccggccgctgcaaagaggccctggtgatacgaggacgcaatctgtacccgcaggacatcgagcacgaactccgcctgcaacacccggaacttgagagcgtcggcgccgcgttcaccgtcccggcggcacctggcacgccgggcttgatggtggtccacgaagtccgcaccccggtccccgccgacgaccacccggccctggtcagcgccctgcgggggacgatcaaccgcgaattcggactcgacgcccagggcatcgccctggtgagccgcggcaccgtactgcgtaccaccagcggcaaggtccgccggggcgccatgcgtgacctctgcctccgcggggagctgaacatcgtccacgcggacaagggctggcacgccatcgccggcacggccggagaggacatcgcccccactgaccacgctccacatccgcaccccgcgtaa

SEQ ID NO: 17 - protein, 89 aa, Streptomyces roseosporus
MNPPEAVSTPSEVTAWITGQIAEFVNETPDRIAGDAPLTDHGLDSVSGVALCAQVEDRYGIEVDPELLWSVPTLNEFVQALMPQLADRT

SEQ ID NO: 18 - DNA, 270 bp, Streptomyces roseosporus
atgaacccgcccgaagcggtcagcacgcccagcgaggtcaccgcgtggatcaccggacagatcgccgagttcgtgaacgagacacccgaccggatcgccggtgacgcacccctgaccgaccatggcctcgactccgtctccggagttgccctctgcgcgcaggtcgaggaccgctacgggatcgaggtcgacccggagctgctgtggagcgtccccacactcaacgagttcgtccaggcactgatgccccagttggccgaccgcacctga

SEQ ID NO: 19 - protein, 545 aa, Streptomyces roseosporus
MIGVAPPAYDPAAPESATTLPVGTPTTVRSYVRSLLRRHRRAFTVLIAVNAVAVVASITGPYLLGGLVEDLSAGVTDLHLERTAAIFAVALVVQVLFTRSMRLRGAMLGEEMLADLREDFLVRSVGLPPGVLERAGTGDLLSRITTDIDRLANAMREAVPQLAIGVVWAGLLLGALTVTAPPLALAVLIALPVLIVGCRWYFRRAPSAYRSEAAGYAAVAAMLAETVDAGRTVEAHRLGGRRVALSDRRISQWTAWERYTLFLRSVLFPVINATYVTILGAVLLLGGWFVLEGWLTVGQLTTGALLAQMMVDPIGLILRWYDELQVAQVSLARLVGVRDIEPDAGDAEVGPEGRDVRADEVRFGYREGVDVLHKVSLDVAPGTRLALVGPSGAGKSTLGRLLAGIYAPRTGEVTLGGAELSRMTAERVREHVALVNQEHHVFVGSLRDNLRLAREGAKDAELWASLAAVDADGWAKALEKGLDTEVGSGGFTLTPAQAQQIALARLVLADPHTLVLDEATSLLDPRAARHLERSLARVLEGRTVV

SEQ ID NO: 20 - DNA, 1637 bp, Streptomyces roseosporus
gccaccaccgtacggccctccagcacccgggccagggaacgctccagatgacgggcggcccgcgggtccagcagcgacgtcgcctcgtccagcaccagcgtgtgcggatcggccagcaccagccgggccagcgcgatctgctgcgcctgggccggggtcagcgtgaacccgcccgaaccgacctcggtgtccagccccttctccagcgccttcgcccagccgtccgcgtcgaccgcggccagcgacgcccacagctcggcgtccttcgccccttccctggccaggcgcagattgtcccggagcgaaccgacgaagacatggtgctcctggttgaccagggccacatgctcacggacccgctccgccgtcatccgcgacaactccgccccgccgagcgtcacctcaccggtgcgcggtgcgtagatccccgccagcagccggcccagcgtcgacttgcccgcgccggacgggccgaccagggcgagccgggtgcccggagccacgtcgagcgacaccttgtgcaggacgtcgacaccttcccggtacccgaagcggacctcgtccgcccgtacgtcccggccttccgggccgacctcggcgtcgcccgcgtccggctcgatgtcccggacgccgaccagccgggccagcgacacctgggccacctggagctcgtcgtaccagcgcaggatcagaccgatcgggtcgaccatcatctgggccagcaacgcccccgtcgtcagctgcccgaccgtcagccacccctccagcacgaaccagccgccgagcagcaggaccgcgccgaggatcgtcacgtacgtggcgttgatgacggggaagagcaccgagcggaggaagagtgtgtaccgttcccacgctgtccattgagaaatccgccggtccgacagcgccacccggcggccgccgaggcggtgcgcctccacggtccgccccgcgtccacggtctccgcgagcatcgcggcgacggcggcgtaaccggcggcctccgagcggtacgcggagggggcccggcggaagtaccagcggcagcccacgatcagcaccggcagcgcgatcagcacggccagcgccagcgggggagcggtcaccgtcagcgcgccgagcagcagcccggcccacacgacgccgatcgccagctgcggcacggcctcgcgcatcgcgttcgccagccggtcgatgtccgtggtgatccgggacagcagatcgcccgtcccggcccgctccagcacaccgggcggcagcccgacggaccggacgaggaagtcctcgcgcagatccgcgagcatctcctcgcccagcatcgcgccgcgcagccgcatggagcgggtgaacaggacctggacgaccagcgccaccgcgaagatcgcggccgtacgctccagatgcaggtcggtgaccccggccgagaggtcctcgaccagaccgcccagcagatacggtccggtgatcgaggcgaccaccgccaccgcgttgaccgcgatcaggacggtgaacgccctgcggtgccgacgcagcagactccgtacgtaactccgcacggtcgtcggtgtgcccacgggcagtgtcgtcgccgactccggggccgcggggtcgtacgccgggggtgcgacgccgatcat

SEQ ID NO: 21 - protein, 368 aa, Streptomyces roseosporus
MSPPAPPEALQRPAPTAQEPVRTGSRTGLVAICVSLFAALVVSVVVAIGLGPAVVPPAETARFLWAALSGGPISADEVTTYQIIWQIRTPRVLLAALVGAGLSAVGVAIQALVRNALADPFVLGVSSGASVGAVGVTVMGGLAVFGIYAVSVGAFLGALVASVLVYGASSTKGALSPLRLVLTGVAMSLGFQAVMSVIIYFAPSSEATSMVLYWTMGSFGAASWGSLPVVTAAVLLGVLVLHRHGRPLDVLALGDETAASLGISPDRHRKSLLVLVSLVTGVMVAVSGSIAFVGLVMPHLVRMVVGATHARVLAVAPLAGAVFMVWVDLVSRTLVAPRELPLGVITALVGVPVFITLMRRKSYMFGGR

SEQ ID NO: 22 - DNA, 1869 bp, Streptomyces roseosporus
tcatgccctctcctcgatttcctcgatgctcttcatggcggggacgtcgccgctcttcatgacggagacgtcgtcaccgacgccgttcaccgcgtccgccgcggccgcctcgtcgtcggtctcgcgggtgacgaccgcccggtagcgcggttcgttgcgcagcaggtcgtggtgggttcccacggcgacgaccgtgccctcgtggacgaggaccacccggtcggcggcgtcgagcagcagcggcgacgaggcgaacgccaccgtcgtacgaccctggcgcagcttcgcgatgccggcggcgacccgtgcctcggtgtgcgagtcgaccgcggaggtcggctcgtccagcaccagcgcctccgggtcggtgaccagggaccgggccagcgccagacgctggcgctggccgccggacagggaccggccgcgctcggtgatccgggtccgcatcgggtccccgtcgttgtcgacggacgcctgggccagagcgctcagcacatcggcgcactgggccgcctccagcgccgtgtccggggtgaccaggcccgaggacgggacgtccagcagctcctggagcgtgccggacagcagcaccgggtccttgtcctggaccaggaccgccgctcgtgcggcgtccagcgggatctcgtccagggcgaccccgccgagcagcaccgacggggtcgccgcggcggccttgtcgtcctcctcgccggtctccgcgtgcccgccgagccgttcggccagccggcccgcctcgtccgggtcaccgcagacgacggccgtgaactgcccgcgcggagccatcagcccggtcgccgggtcgtacagatcaccggtgggcgtcacaccctccaccgtggcctcctgcgcactgcggtgcagcgacagcacccgcaccgcacgctgcgcggacggccgggagaaggagtacgccatcgcgatctcctcgaagtgacgcagggggaacagcatcagggtggccgcgctgtagaccgtgacgagctggccgacgtcgatgcggccgtcccgggcgagcgtcgccccgtaccagaccaggcagatcagcaggatccccggcagcagcacctgcaccgccgagatcagcgcccacatcctggcgctgcgcacggccgcgcggcggacctcctgggaggcgcggcggtagcggccgaggaacagctcctcgccgccgataccgcgcagcacccgcagaccggccacggtgtccgaggccagctcggtggccttgcccgccttctcgcgctgctcgtcggcgcggcgggtggcgcgcggcagcaacggcagcacggccagggccagcaccggcatggcgagcgccaccaccagcccgagggacggcagatagaccgccaggccgacgcagatcaccacgagggcggtggccgcggccgcgaaccgggagagcgcctcgacgaaccagccgatcttctccacgtcaccggtcgacacggccacgacctcaccggccgcgacccgtcgggtcagcgcggagcccagctcggcggtcttgcgggcgagtagttgctggacccgcgcggcggcggtgatccagttggtcacggcggtccggtggagcatggtgtcgccgacggcgatcagtacgccgagggccacgatgaggccgcccgccagggcgagccgccctccggagcggtcgatgacggcctggacggcgagccccacggtgaccggcagaccggcgatgccgagctggtgcagcagcccccaggagagggacttcagctgcccgccgagctgattgcgcccgagccagaacaggaagcgagggcccgaacgtacatcggggtcgccgggatccgaatacggaaggtcgcgaatctgcat

SEQ ID NO: 23 - protein, 494 aa, Streptomyces roseosporus
MNDDARPAPEPQDIPPHSGAADEVNRQDPSRRSVLWTTAGVAGAGLGLGALGAGTASAAGRSAPDAVAAAEAVAAAPPRQGRTMAGVPFERRSTVRVGIIGLGNRGDSMIDLFLALPGVQVKAVCDTVRDKAEKAAKKVTAAGQPAPAIYAKDEHDYENLCKRGDIDFVYVVTPWELHFPMAKTAMLNGKHVGVECPIAMRLEELWQLVDLSERTRRHCMQLENCCYGKNEMRVLRMAHAGLFGELQHGAGAYNHDLRELMFDPDYYEGPWRRLWHTRLRGDLYPNHGFGPVANYMDVNRGDRVVSISSVGTTPLGLAAYREEHMPAGDPSWKESYIGADRTISLVQTAKGRVIRLEHDVSSPHPYSRINSLGGTKGVFEDYPERIYLEPTNTNHQWDDFKKYAEWDHWLWKEHANPPGGHGGMDYIMVFRLMQCMRLGLVPDFDVYDAAVWTAPVPLSHLSIKAKGVPLPIPDFTRGEWKKTRSGMDSEKPAE

SEQ ID NO: 24 - DNA, 1486 bp, Streptomyces roseosporus
gtcactccgcgggcttctccgagtccatgccggaccgggtcttcttccactcgccccgggtgaagtccgggatcggcaggggcacgcccttggccttgatggacagatggctcagcggcacgggggccgtccagaccgccgcgtcgtacacgtcgaagtcgggcaccagaccgagccgcatgcactgcatcaggcggaacaccatgatgtagtccatcccgccgtggccgcccggcggattggcgtgctccttccacagccagtggtcccactcggcgtacttcttgaagtcgtcccactggtggttggtgttcgtgggctccagatagatccgctccgggtagtcctcgaacacgcccttggtcccgccgaggctgttgatccgcgagtacgggtggggcgacgacacgtcgtgctccaggcggatcacccggcccttggcggtctgcacgaggctgatcgtccggtcggccccgatgtacgactccttccagctcgggtcgcccgcaggcatgtgctcctcgcggtaggcggcgaggcccaggggggtggtgccgacactgctgatgctgacgacccggtcgccccggttgacgtccatgtagttggcgaccggaccgaacccgtggttggggtagaggtcaccgcgcagccgggtgtgccacagccgccgccacggaccctcgtagtagtcggggtcgaacatcagctcacgcagatcgtggttgtaggccccggcgccgtgctgcagctcaccgaagagacccgcgtgcgccatccgcagcacccgcatctcgttcttgccgtaacaacagttctccagctgcatgcagtgccgccgggtgcgctcggagagatccacgagctgccacagctcttccaggcgcatcgcgatcgggcactccaccccgacgtgcttgccgttcagcatcgccgtcttcgccatcgggaagtgcagctcccacggcgtcaccacgtagacgaagtcgatgtccccgcgcttgcagaggttctcgtagtcgtgctcgtccttggcatagatcgccggggcgggctgaccggcggccgtcaccttcttggcggccttctccgccttgtcccggaccgtgtcgcacaccgccttgacctggacgcccgggagggcgaggaagaggtcgatcatgctgtcgccgcggttgccgaggccgatgatgccgacccggaccgtggagcgccgctcgaagggcacgcccgccatggtgcggccctgccggggaggggcggcggccacggcttccgcggcggcgacggcgtccggggcgctccgcccggccgccgaagcggtgcctgcgcccagtgcgccgaggccgagtccggccccggccacgcccgccgtggtccacagcaccgaacggcggctgggatcctgccggttcacctcgtcggccgcgccgctgtgcgggggtatgtcctgcggttccggtgcgggccgggcgtcgtcgttcat

SEQ ID NO: 25 - protein, 984 aa, Streptomyces roseosporus
MPLLEPDPEALRPGTAREPAPDRVTDGSAGGTPEPLRSELTALLGADKVLWKISDLVRYASDASPYRFLPRVVLVPEDLDDVSAILSYAHGKGRSVVFRAAGTSLNGQAQGEDILVDVRRHWTGVEVLDDGARARILPGTTVMRANAALARYGRLLGPDPASAIACTLGGVVANNASGMTAGTTRNSYRTLASLTFVLPSGTVVDTAHPAADEELAHAEPELCAGLLELKAEIEADAELTARIRAKYTIKNTNGYRLDAFLDGATPVQILRGLMVGSEGTFGFISEVVFDTLPLDRRVSSGLLFFPSLTAAAAAVPRFNEAGAIAVELMDGNTLRASVSVPGVPADWAALPRETTALLVEFRAADEAGRAAFERAADAVVAGLDLVRPAASVTNAFTRDAGTIAGYWKARKAFVTAVGGSRPSGTTLITEDFAVPPARLADACAALLELQSRHGFDAAVAGHAAHGNLHFLLAFDAAKPADVARYDAFMQEFCALVVDRFDGSLKAEHATGRNIAPFLEREWGPRATELMWRTKQVIDPAGVLAPRIVLDRDPRAHLRGLKTIPKVEAVADPCIECGFCEPTCPSEDLTTTPRQRIVLRREMMRQTDGSPVESGLLDAYGYDAVDTCAGDSTCKLACPVGIDTGAMMKGFRHRRHTPREERIAALTAKNFRAVEASARLAVAAADTVGNRVGDAPLQAVTRLARKAVRPDLVPEWLPQIPGAAARRLPDTARVGASAVYYPACVNRIFAGPDDGDAGPALSLAEAVVAVSGRAGKPVWIPEDVTGTCCATIWHSKGYDAGNRIMANRIVEAAWGWTAGGTLPLVVDASSCTLGIAEEVVPYLTEDNRALHRELTVVDSLVWAAEELLPHLTVFRTAGSAVLHPTCSMEHLGDVGQLRALAEACAQEVVVPDDAGCCAFAGDRGMLHKELTDSATAKEAAEVDRRPYDAYLSANRMCEIGMERATGHPYRSALIELEHATRPTLP

SEQ ID NO: 26 - DNA, 2955 bp, Streptomyces roseosporus
tcacgggagagtcggccgggtggcgtgttccagttcgatcagcgccgagcggtacgggtgcccggtggcgcgttccatgccgatctcgcacatccggttcgccgacagataggcgtcgtaggggcggcggtcgacctcggcggcctccttggccgtcgccgagtcggtcaactccttgtggagcatgccccggtcgcccgcgaacgcacagcaccccgcgtcgtccgggaccacgacctcctgcgcgcaggcctcggccagcgcccgcaactgccccacgtcacccagatgttccatcgaacaggtcggatgcaggaccgccgagccggccgtccggaacaccgtcagatgcggcagcagctcctcggccgcccacaccagcgagtccacgacggtcagttcgcggtggagcgcccggttgtcctcggtgaggtagggcaccacctcctcggcgatgccgagcgtgcacgaggaggcgtccacgaccagcggcagcgtcccgcccgccgtccagccccaggcggcctccacgatccggttcgccatgatcctgttgcccgcgtcgtatcccttggaatgccagatcgtcgcgcagcacgtgcccgtgacgtcctcggggatccacaccggctttccggcccgcccggacacggcgaccaccgcctcggccagggagagagcgggccccgcgtcgccgtcgtcgggcccggcgaagatgcggttgacacaggccgggtagtagacggcgctcgcccccacgcgtgcggtgtccggcagccgccgggccgcagcaccggggatctgcggcagccactccggtacgagatcggggcgcacggccttgcgggcgaggcgcgtcacggcctgcagcggtgcgtcccccacccggttcccgacggtgtcggccgccgccacggccagccgcgccgaagcctccaccgcgcggaagttcttcgcggtgagggccgcgatccgctcctcgcgcggggtgtgcctgcggtgccggaagcccttcatcatcgccccggtgtcgatgccgaccgggcaggcgagtttgcaggtggaatccccggcgcaggtgtccacggcgtcatagccgtacgcgtccagaaggccggactccaccggtgagccgtcggtctgccgcatcatctcccggcgcagcacgatccgctggcgcggagtggtggtcagatcctcactggggcaggtcggctcgcagaagccgcactcgatgcacgggtcggcgaccgcctccaccttcggaatggtcttcaggccccgcagatgggcccgcgggtcccggtccagcacgatgcgtggagcgagcaccccggcggggtcgatgacctgcttggtccgccacatcagctcggtggcgcgcggcccccactcgcgctccaggaacggcgcgatattgcgtccggtggcgtgctccgccttgagcgatccgtcgaaccggtccaccaccagcgcgcagaactcctgcatgaacgcgtcgtaccgggccacgtcggccggcttcgccgcgtcgaacgcgagcaggaagtgcagattgccgtgtgccgcgtgccccgccacggcggcgtcgaagccgtggcgcgactggagctccagcagcgccgcgcaggcgtccgccagccgggcgggcggcaccgcgaagtcctccgtgatcagggtggtgcccgagggccgggagccgccgacggcggtcacgaacgccttgcgggccttccagtacccggcgatcgtcccggcgtcccgggtgaacgcgttggtcacggacgccgccggacgcacgaggtccagaccggccacgaccgcgtccgccgcccgctcgaacgccgcccggcccgcctcgtcggccgcccggaactccaccagcagcgcggtcgtctcccggggcagcgccgcccagtccgccggaacgcccggcacgctgacggaggcgcgcagggtgttgccgtccatcagctccacggcgatcgcccccgcctcgttgaaccggggcacggccgccgcggcggcggtgagggaggggaagaacagcaggccgctggagacccgccggtcgagcgggagggtgtcgaagacgacctcggagatgaagccgaacgtgccctcggagccgaccatcagcccgcgcaggatctgcaccggcgtcgccccgtcgaggaaggcgtccaggcgatagccattggtgttcttgatcgtgtacttggcgcggatccgggcggtcagctccgcgtccgcctcgatctccgccttcagctccagcagccccgcgcacagctccggttcggcgtgggccagctcctcgtcggcggcggggtgcgcggtgtcgacgacggtgccgctcggcagcacgaaggtgagcgaggcgagcgtgcggtaggagttgcgggtggtgcccgccgtcatgcccgaggcgttgttggcgacgaccccgccgagggtgcaggcgatggcgctggccggatcggggcccagcagcctgccgtaccgggcgagggcggcgttggcccgcatgacggtggtgcccggcaggatccgggcccgcgccccgtcgtccagcacctccacgccggtccagtgacggcgtacgtcgacgaggatgtcctcgccctgggcctggccgttgaggctggtgcccgcggcccggaagaccacggatcggcccttgccatgggcgtacgacaggatcgcggacacgtcgtcgaggtcctcggggaccagcacgacccgggggaggaagcggtaggggctggcgtcggaggcgtaccgcacgaggtcggagatcttccagagcaccttgtccgcgccgagcagcgcggtcagctcgctccgcagcggctccggggtgccgcccgcgctgccgtcggtgacccggtcgggggcgggttcccgcgccgttccggggcgcagcgcttccgggtcgggctccagcagcggcat

SEQ ID NO: 27 - protein, 166 aa, Streptomyces roseosporus
MDAPDSPDSPDSPESRDSRDSRDSRDGLLAEQLLRLTRRLHRIQRRQLEPIDITPAQFRLLRTVASYDAAPRMADLARRLDVVPRAVTTLVDALEASGRVRRAPDPDSRRVVRIEITDEGRATLRSLRSARRAAAEEILAPLTADQREVFGELLSALVDGMPERHC

SEQ ID NO: 28 - DNA, 501 bp, Streptomyces roseosporus
tcagcagtggcgctccggcattccgtcgaccagagcggacagcagctcgccgaacacctcgcgctgatcggcggtcaatggagccaggatctcctctgcggcggcccggcgcgcgctgcgcagggaccgcagcgtggcgcgcccctcgtcggtgatctcgatacggaccacccggcggctgtcgggatccggggcgcggcgcacccggccgctcgcctccagggcgtcgaccagcgtggtcacggcgcgcgggacgacgtcgagccgtcgggccagatccgccatccggggggccgcgtcgtaactcgcgaccgtccgcaacaggcggaactgggccggagtgatgtcgatcggctccagctggcggcgctggatgcggtgcagccgccgggtgagccgcagcagctgttcggcgagcaagccgtcacgggagtcccgggaatcgcgagagtcccgggactcgggggaatcaggggagtcgggggaatccggggcgtccat

SEQ ID NO: 29 - protein, 607 aa, Streptomyces roseosporus
MKPDEPTWTPPPDARPAADRRPAEVRRILRLFRPYRGRLAVVGLLVGASSLVGVASPFLLREILDTAIPQGRTGLLTLLALGMILTAVMTSVFGVLQTLISTTVGQRVMHDLRTAVYTQLQRMPLAFFTRTRTGEVQSRIANDIGGMQATVTSTATSLVSNLTAVIATVVAMLALDWRLTVVSLLLLPVFVAISRRVGRERKKITTQRQKQMAAMAATVTESLSVSGILLGRTMGRSDSLTQGFAEESERLVDLEVRSNMAGRWRMSVIGIVMAAMPAVIYWAAGLTFASGAAAVSIGTLVAFVTLQQGLFRPAVSLLSTGVQMQTSLALFQRIFEYLDLTVDITEPEHPVRLERIRGEIAFEDVDFSYDEKNGPTLTGIDVTVPAGDSLAVVGSTGSGKSTLSYLVPRLYDVTGGRVTLDGIDVRDLDFDTLARAVGVVSQETYLFHASVADNLRFAKPEATDEEIEAAARAAQIHDHIASLPDGYDTMVGERGYRFSGGEKQRLAIARTILRDPPVLILDEATSALDTRTEQAVQEAIDALSAGRTTLTIAHRLSTVRDADQIVVLEDGRVAERGTHEELLDRDGRYAALIRRDSHPVPVPVPAP

SEQ ID NO: 30 - DNA, 1824 bp, Streptomyces roseosporus
atgaaacccgacgaacccacgtggacgcccccgcccgatgcccgccccgccgccgaccggcggcccgccgaggtgcgccgcatcctccgcctcttccgcccctatcgcggccgcctggccgtcgtcggcctgctggtcggcgcatcctccctggtcggggtcgcctccccgttcctgctgcgcgagatcctcgacaccgccatcccgcagggacgcacgggcctgctgaccctgctggcgctcggcatgatcctcaccgccgtgatgaccagcgtcttcggcgtgctccagaccctcatctcgaccaccgtcggccagcgcgtcatgcacgacctgcgcaccgccgtctacacccagctccagcggatgccgctcgccttcttcacccggacccgcacgggcgaggtccagtcccgcatcgccaacgacatcggcggcatgcaggcgacggtcacctccaccgcgacctcgctggtctccaacctcacggccgtcatcgcgaccgtcgtcgccatgctcgccctcgactggcggctcaccgtcgtctcgctgctcctgctgccggtcttcgtcgcgatcagccgccgcgtcggccgggaacgcaagaagatcaccacccagcgccagaaacagatggccgcgatggccgccaccgtcaccgagtccctctcggtcagcggcatcctcctcggccgcacgatgggccgctccgactccctcacccagggcttcgccgaggagtccgagcgcctggtcgacctcgaagtgcgctccaacatggccggccgctggcggatgtccgtgatcggcattgtgatggccgccatgcccgccgtcatctactgggcggccggactcaccttcgcgtccggagccgccgccgtctccatcggcacactcgtcgccttcgtcacgctccagcaggggctgttccgcccggcggtcagcctgctctccaccggtgtgcagatgcagacctccctcgccctcttccagcgcatcttcgaatacctcgacctcacggtggacatcaccgaaccggaacacccggtccggctggagaggatccgcggcgagatcgccttcgaggacgtcgacttcagctacgacgagaagaacggcccgacgctgaccggcatcgacgtgaccgtccccgcgggcgacagcctcgcggtcgtcggctccaccggctccggcaagtccaccctcagctacctggtgccccggctgtacgacgtcaccggcggccgggtcacgctcgacggcatcgacgtccgcgacctggacttcgacaccctcgcccgggccgtcggcgtcgtctcccaggagacgtacctcttccacgcctcggtcgccgacaacctccgcttcgccaagccggaggccaccgacgaggagatcgaggccgcggcccgcgccgcgcagatccacgaccacatcgcctccctgcccgacggctacgacacgatggtcggcgagcgcggctaccgcttctcgggcggcgagaagcagcgcctcgccatcgcccgcaccatcctgcgcgaccctccggtgctgatcctcgacgaggcgaccagcgcgctcgacacccgtacggaacaggccgtgcaggaggcgatcgacgccctgtccgccggacggaccacgctcaccatcgcgcaccggctctccaccgtccgcgacgcggaccagatcgtcgtcctggaggacggccgggtcgccgagcgcggtacgcacgaggaactgctcgaccgcgacggccgctacgccgccctgatccgccgcgactcccacccggtcccggtcccggtcccggctccctga

SEQ ID NO: 31 - protein, 262 aa, Streptomyces roseosporus
HRHLAERPRRCAVLALLRPAAGPAGRAGRRPGPAARSDPLHRQGGRRPHRDIGEAAGRAARPAADTQTAAAEPAQRPGVHRQLHRAARRMQHRGEDPGGGARHDGHAGSRGDGQARPRPVLPAAPLRPRGPGRAALSHGGSRPVGRGVPGPSAHPGPPDARHPRGGGDGGTRVRRAAALHRTGSGERLSRPAAYTQHTAHRAHGAHSTHGGAAAPVGRGATAPGGAMVRRANPRSGRRRQAGWSGSSSGLSPCTWCICGTAQ

SEQ ID NO: 32 - DNA, 612 bp, Streptomyces roseosporus
atgagagctctcctcggggtggaactccccggctaccgcaccgtcgacaccgacacctggctgaacgaccacggcgatgtgctgtccttgcacttcttcgacctgccgccggacctgccggccgcgctggacgacggcccggccctgcggcacggtctgacccacttcaccgccagggcgggcggcggcctcatcgagacatcggtgaagcggctgggcgagctgcccgccctgcggcagatactcaaactgccgctgccgaaccagcccagcggccaggcgttcatcggcagcttcaccgtgccgcgcgccggatgcagcaccgtggtgaagatccaggcggcggagcgcggcatgacgggcatgcgggaagccgtggtgatggccaagctcggccccgaccagtacttccggccgcacccctacgcccccgaggtccagggcgggctgccctttcacacggcggatcacgtccagtgggacgcggagttcccggaccatccgctcacccgggtccgccggacgctcgacaccctcgcggcggcggtgacggtggcacccgagttcgccgcgctgccgcccttcaccggaccggctcaggcgaacggctga

SEQ ID NO: 33 - protein, 286 aa, Streptomyces roseosporus
MVNESPDARPRRRLRPTRRGKIVLVVGALLVVTAAVLIPLSLTGSDEPPKKQETPQSTLMIPEGRRVSQVYEAVDKALDLKPGSTLKAASTVDLKLPAQAEGNPEGYLFPATYPIDDTTEPAGLLRYMADTARKHFAADHVTAGAQRNNVSVYDTVTIASIVQAEADTPADMGKVARVVYNRLLKDMPLQMDSTINYALKRSTLDTSTADTQLDSPYNSYRIKGLPPTPIGNPGEDALRAAVRPTPGPWLYFVTVGPGDTRFTDSYDEQQKNVEEFNRGRGSATTG

SEQ ID NO: 34 - DNA, 861 bp, Streptomyces roseosporus
atggtgaacgagtccccggacgcccgaccccgtcgcagactccgcccgacccgccgcggaaagatcgtcctggtcgtcggcgcactgctcgtcgtgacggccgccgtcctgatccccctgtccctgaccggatcggacgagccgccgaagaagcaggagaccccgcagagcacgctgatgatccccgaaggccgccgagtgtcccaggtgtacgaagcggtcgacaaggcgctcgacctgaagcccggcagcacgctgaaggccgcgtcgacggtggacctgaagctgcccgcccaggccgagggcaaccccgaggggtacctcttcccggccacgtatccgatcgacgacacgaccgagcccgcgggcctgctgcgctacatggccgacaccgcccgcaaacacttcgccgcggaccatgtcacggccggggcccagcggaacaacgtctccgtctacgacacggtcaccatcgccagcatcgtccaggccgaggccgacaccccggccgacatgggcaaggtggcccgcgtcgtctacaaccggctgctcaaggacatgccgctccagatggactccaccatcaactacgccctcaagcgctccaccctggacacgtcgaccgccgacacccagctggacagcccgtacaacagctaccggatcaagggcctgccgccgacgcccatcggcaatccgggagaggacgcgctgcgcgccgccgtcaggcccacgcccggcccctggctctacttcgtcacggtcggccccggcgacacccggttcacggacagctacgacgagcagcagaagaacgtcgaggagttcaaccgcggccgtggctccgccacgacgggctga

SEQ ID NO: 35 - protein, 386 aa, Streptomyces roseosporus
MIPGARRVSRSVNISGVRELDVVVIGAGQAGLSAAYHLRRVGLEPDNDFVVLDHAPRPGGAWQFRWPSLTYGKVHGMHALPGMELTGADPDRPSSEVIGAYFAAYEDRFGLRVHRPVEVSAVREGSGGRLLVETSEGTYAARALINATGTWDRPFWPRYPGQETFRGRQLHTANYPGPEEFAGQRVLVVGGGASGTQHLMEIAEHAADTFWVTRSEPVFREGPFTEEWGRAAVAMVEERVRNGLPPKSVVSVTGLPLNDAVRRARERGVLDRLPMFDRITPTGVAWDDGRTVETDVILWATGFRPAVDHLAPLKLREPGGGIRAEDTRAVRDGRVHLVGYGPSASTIGANRAGRAAVRSVMRLLKETGADGGASAVVSVPAPVPGV

SEQ ID NO: 36 - DNA, 1161 bp, Streptomyces roseosporus
tcacacccccggcacgggcgcgggcacggagacgaccgccgaggcccctccgtcggcgcccgtctccttcagcagccgcatgaccgaccggaccgccgcgcggccggcgcggttcgcgccgatggtgctggcggaagggccgtacccgacgagatggacgcgcccgtcccgtacggcacgggtgtcctcggcccggatgccaccacccggctcgcgcagcttcagcggggccagatggtccacggcgggccggaacccggtcgcccagaggatcacgtcggtctcgacggtacggccgtcgtcccaggccacaccggtcggcgtgatccggtcgaacatcggcagccggtccagcactccccgctcccgggcccgccgcacggcatcgttcagcggcagcccggtcacgctgaccacgctcttcggcggcagcccgttgcgtacccgctcctccaccatcgccacggccgcccgcccccactcctcggtgaacggaccttcgcggaacaccggttcgctgcgggtcacccagaaggtgtcggccgcgtgctcggcgatctccatcagatgctgcgtaccggaagcgccacccccgaccacgaggacgcgctgcccggcgaactcctcgggccccggatagttcgccgtgtgcaactgccgcccccggaacgtctcctggcccggatagcgcggccagaacggccggtcccaggtgccggtggcgttgatcagagcccgcgcggcgtacgtcccctcggacgtctccaccagcagccgaccgccgcttccctcccgtacggcgctcacctccacgggccggtggacccgcaggccgaagcggtcctcgtacgcggcgaagtacgcgccgatcacctccgacgagggccggtcggggtcggccccggtcagctccatgcccggaagcgcgtgcatcccgtggaccttgccgtacgtcagcgagggccagcggaactgccacgcaccgcccggccggggcgcgtggtccagcacgacgaagtcgttgtccggctccagcccgacgcggcgcagatggtaggcggcggacagtcccgcctgacccgcgccgatgacgaccacgtccagctcgcgcaccccagaaatgttcacgcttctactaactcgtcgggcgcccgggatcat

SEQ ID NO: 37 - protein, 182 aa, Streptomyces roseosporus
VPGLARPTRSTPPRQLRRGHPPSLSRPPTEPLTTPPPPEPPTQRHTSLCNTDSLAVAMSERPRHRPQKRSIACGACRAGSSPLAHTGVGLVRGGAGTALVGSHAEVADRIEEYHALGVEHFVLSGYPHLEEAYWFGEGVTPELSRRGLLSTVPASPLLGVSGAESRTATAPGGAPLLLAGGR

SEQ ID NO: 38 - DNA, 279 bp, Streptomyces roseosporus
tcagcgacccccggcgagcagcaggggagccccgcccggcgccgtggcggtccggctctcggcgccactcacacccagcagcggcgacgcgggcacggtcgacagcagcccgcggcgggacagctcgggtgtgacgccctcgccgaaccagtacgcctcctccagatgcggatatccggagagcacgaagtgctccacgcccagcgcgtggtactcctcgatccggtccgcgacctccgcatggctgcccaccagcgcggtcccggccccgccgcgcac

SEQ ID NO: 39 - protein, 391 aa, Streptomyces roseosporus
VAVVAEDLRRRFAATKVTFLIVDLTGRALARLSTTTAAGSENETERIPLFGGSVYEQVIRTQRPHHEPAGQEQRVIVPVTNRGDAIGLLELLLPAGRSDEEEVVLAVGEAAHALAYVVIANGRFTDFYTWGKRSRPPTLAAEIQYQLLPQALSCEAAQFTLSGSLEPSEDLSGDTFDYALDRDTLHLSVTDPMGHDLGAALAATVLVGALRRARRAGAPLAEQARQGDQALTSHGQGHATGQLLRINLHTGKAELVNAGHPWPMRMRAGMVETIPCQVDQPFGLAVVSPRPYRVQTLDLHPGDRLLMLTDGMLERHGEKIDVAALLRQTRSLHPRETTLMLTSAVRDAAGGRLEDDATVVCLDWHGPQEVHRHVSSGADTHQASAARPPNR

SEQ ID NO: 40 - DNA, 1176 bp, Streptomyces roseosporus
tcaacggttcggtgggcgggcggctgaggcttggtgggtgtccgcgccggagctgacgtggcggtgtacttcttgtgggccgtgccagtccaggcacaccacggtggcgtcgtcttcgaggcggccgcctgcggcgtcgcgtacggcggaggtcagcatcagggtggtctcgcgtgggtgcaggctgcgggtctgccgtagcagggcagctacgtcgatcttctctccgtggcgttcgagcatgccgtccgtcagcatgaggagccggtctcccgggtgcaggtccagggtttggacgcggtaggggcggggcgagacgacggccagcccgaaaggctggtcgacctggcaggggatggtttccaccatgcctgcacgcatgcgcatgggccagggatggccggcgttgacgagctcggcctttccggtgtggaggttgatgcgcagcagttgtccggtggcgtggccctgtccgtggctggtcagggcctggtcgccctggcgggcctgttcggcgaggggggctccggcgcggcgggctctgcgcagggcgcccaccaggacggtggccgccagggctgcgccgaggtcatggcccatggggtcggtcaccgacaggtgcagggtgtcgcggtccagtgcgtagtcgaacgtgtcgccgctgaggtcctcggagggctccaggctcccgctcagggtgaactgcgcggcctcgcaggacagggcctgtggaagcagctgatactggatctccgctgccagggtcgggggtctggagcgtttgccccaggtgtagaagtcggtgaagcgcccgttggcgatcacgacgtaggccagcgcgtgagcggcttccccgacagcgagcacaacctcttcctcgtcgctcctgccggccggcaggagcagttcgagcagaccgatcgcgtccccccggttggtcacgggaactattacccgctgttcttgtccggcgggctcgtgatgcggccgctgggtgcggatcacctgctcgtagacgctccccccgaacagagggatccgctccgtttcgttttcactgcccgcggcagtcgtggtggagagccgcgcgagcgctctaccggtcagatccacaatcaggaatgtgaccttcgtagccgcgaaccgcctgcgcagatcttctgcgaccacggccac

SEQ ID NO: 41 - protein, 219 aa, Streptomyces roseosporus
MRVRLQVGVALCGLGVLVTQERERRRCGARSAGMVPDPLLLAVAFEAGAFAFQGASRSRVRAEHGQGGALRQTARKFANSGPATGRAVGQDDPMSQDLVTFLHARLDEEANLAGRCDGDGCGEWAPHGHTVDFCQGELSGFHSTIALHVALHDPARVLREAEAKRRVLARHGLSPATGDPELPWDNRDDCRYDGATWPCDDLLGLASPYADHPDYPQRP

SEQ ID NO: 42 - DNA, 660 bp, Streptomyces roseosporus
tcaggggcgttgggggtagtcagggtgatctgcgtagggtgacgcgagaccgagcaggtcatcgcatggccaggtcgcgccgtcgtaccgacagtcatcgcggttgtcccacggcagttcggggtcacccgtggcagggctgagcccatgtcgggcgagcacgcgccgcttggcctcggcttcccgcaggacgcgagccgggtcgtgcagcgcgacgtgcagggcgatcgtggaatggaagccggagagttctccctggcagaagtcgaccgtgtgtccgtgaggggcccactccccgcagccgtcaccgtcgcaccggccggccaggttggcctcctcgtccagccgagcgtggaggaacgtcacaaggtcttggctcatggggtcatcctggccgacggctcggccggtggccggcccactgtttgcgaacttgcgggcggtctgtcgcagggcaccgccctgtccgtgttcggcacggacgcgggagcgggaggccccttggaacgcgaatgctccagcttcgaaggcaacggcgagcagcaaggggtccggcaccatccccgcactccgtgcgccacacctgcgcctctcgcgctcttgtgtcacgagaactcccagaccgcaaagcgccacacccacctgcagtcggacgcgcat

SEQ ID NO: 43 - protein, 270 aa, Streptomyces roseosporus
MSVRDLVGMPCHPCEPPRRAEGRRRGVGRMRWWKGVLMTVRHQGVRWWFALLALVGCVVCVLCVVALSGAGHYFGLSLWAGIALVVVGALFPLGGLGFLYWVDDGRSEDSFLVKFLCFVAHSAVLGLAAVSCTGAEAWAFEQRGRWTEATVVGYSPPRVVPGDPPTKVRASCALETAEGERVRPRLPEGRGCRDGVRHGSRLDVLYDPRGLLAPRATEPMDHGVTVPVLGGVATLSGFLGCVALAWRWETLRVRSARRTAARRGRESAAG

SEQ ID NO: 44 - DNA, 813 bp, Streptomyces roseosporus
atgtcggtacgcgatctcgtcgggatgccgtgtcacccgtgcgaaccgccacgccgcgccgaggggcgccggcgcggcgtggggaggatgaggtggtggaagggggtgctgatgacggttcggcatcagggggtgcggtggtggttcgctcttctcgctctcgtcgggtgcgtggtctgtgtcctctgcgtcgtcgcgctcagcggggcggggcactacttcgggctctccttgtgggcgggcatcgcgctcgtggtggtgggggcgctgtttcccctcggggggctgggcttcctgtactgggtggacgacggccggtccgaggacagcttcctcgtgaagttcctgtgcttcgtcgcccactccgccgtcctcgggctggcagccgtctcgtgcaccggggctgaggcgtgggcctttgagcagcgcgggcggtggacggaggcgacggtcgtgggatacagcccgccccgggtggtcccgggtgatccgccgacgaaggtgcgggcgtcctgcgcgctggagaccgccgagggcgaacgcgtccggccccggctgccggagggccgcggctgccgcgacggggtgcggcacgggtcccgcctcgacgtgctgtacgacccccggggtctgctggcgccccgggccaccgagcccatggaccacggcgtcaccgtcccggtcctcgggggcgtggcgaccctgtccggtttcctcggctgtgtcgccctcgcctggcggtgggaaaccctccgggtacgcagcgcgcgccgcacggcagcgcgccgagggcgggaatccgcagccggttag

SEQ ID NO: 45 - protein, 327 aa, Streptomyces roseosporus
MKFTKLAIPVAASALLLTGCGAEVESQGKGSGKSTVKRCGESVEYTVPKRAVAYEGGSADKLFSLGLADHVHGYVMPPANPPVSESPWAKDYAKVKMLSDDLLNKEIVVDAKSDFVVAGWNSGFSDQRGITPEILDKLGVQSFMHSESCYNYPGHPEKLTPFKGLYTDLERLGRIFQVEEEAEKVVAGLKKREAAVAEQAPKGKPVPVFLYDSGTDQPFTAGNQVPPNDIIKTAGGKNIFDGLEERWTQVNWEAVTQAEPEVIMIFDYGDQPAEKKIEFLKKSPHTKELPAVKKNNFFVLDYNEGISSPRNIDGLEKFGKYMRAFKK

SEQ ID NO: 46 - DNA, 984 bp, Streptomyces roseosporus
tcatttcttgaatgcgcgcatgtactttccgaacttctccaggccgtcgatattgcgcgggctgctgatgccctcgttgtagtcgaggacgaagaagttgttcttcttcacggccggcagttccttggtgtgcggcgacttcttcaggaactcgatcttcttctcggcgggctggtcgccgtagtcgaagatcatgatgacctcgggctcggcctgggtgacggcttcccagttcacctgggtccagcgctcctccaggccgtcgaagatgttcttcccgcccgcggtcttgatgatgtcgttgggcggcacctggttgcccgccgtgaacggctggtcggtcccggagtcgtagaggaacacgggcacgggcttgcccttcggagcctgctcggcgacggcggcctcgcgcttcttcaagccggcgacgaccttctccgcctcctcttcgacctggaagatccgtccgaggcgttcgaggtcggtgtagaggcccttgaaaggcgtcaacttctccggatggcccgggtagttgtagcagctctcactgtgcatgaagctctgtacgccgagcttgtcgaggatctccggggtgatgccccgctggtcgctgaagcccgagttccagccggcgacgacgaagtccgacttggcgtccacgacgatctccttgttgaggaggtcgtcgctgagcatcttcaccttggcgtagtccttcgcccagggagactcgctgaccggcgggttggccggcggcatgacgtagccgtgcacgtggtcggccaggcccagactgaacagcttgtcggcgctgccgccctcgtaggcgacggcccgcttcggcaccgtgtactcgacggactcgccgcagcgcttcacggtgctcttcccggagcccttgccctgggattcgacctcggcgccacaccccgtgagcaggagcgcggacgcggcgacggggatggcgagtttggtgaacttcat

SEQ ID NO: 47 - protein, 255 aa, Streptomyces roseosporus
MDLELDGLSVVTDGKSLVRDLSLDVGSGQVVGLVGPNGSGKSTALRCVYRALKPSSGTVKVDGQELSSLTMRRSAQLIAAMTQDGAVDLDFTVEEVIALGRTPHQRGSTPLNGHERDLCEHAMRRLDILHLARRGILTLSGGERQRVLLARALVQEPKILVLDEPTNHLDVRHQVRLLSLLRGAGLTVLVVLHDLNLAAAACDRIGVLSEGRLITSGTPKDVLTPELVDEVFGVRASVVPHPLTGDPQLLYSLDS

SEQ ID NO: 48 - DNA, 768 bp, Streptomyces roseosporus
tcaggaatcgagtgagtagagcaactgggggtcgcccgtcagcggatgcgggacgacggaggcgcggaccccgaatacctcgtcgacgagttcgggcgtgaggacgtccttgggcgtgcccgaggtgatcaggcggccttcgctgagtacgccgatccggtcgcacgcggcggccgcgaggttcaggtcgtggagtacgacgaggacggtcaggccggcaccgcgcagcagggacaggagccgcacctgatggcgtacgtcgagatggttcgtcggctcgtcgaggacgaggatcttcggctcctgcacgagggcgcgggcgagcaggacgcgctggcgctcgccgccggagagggtgaggatgccgcgtcgggccaggtgcaggatgtcgagccgacgcatggcgtgctcgcacagatcccgttcgtgaccgttcaacggggtgctgccgcgctggtggggtgtgcggccgagggcgatcacctcctcgacggtgaagtcgaggtcgacggcgccgtcctgggtcatcgccgcgatgagctgggcgctgcggcgcatggtcagcgacgagagctcctggccgtccaccttcacggtgccggagctgggtttcagggcccggtacacgcaccgcagggcggtggacttgccgctgccgttggggccgacgaggccgaccacctgaccgctgccgacgtccagggagaggtcccgtaccaggctcttgccgtcggtcaccaccgagagcccgtcgagttcgaggtccat

SEQ ID NO: 49 - protein, 368 aa, Streptomyces roseosporus; identical to SEQ ID NO: 21

SEQ ID NO: 50 - DNA, 1107 bp, Streptomyces roseosporus
tcaacggcctccgaacatgtaggacttgcggcgcatcagggtgatgaacaccgggacgccgaccagcgcggtgatgacgccgagcggcagctcgcggggggcgaccagggtccgcgacacgagatcgacccagaccatgaagaccgccccggcgagtggtgcgacggcgagcacccgcgcgtgcgtcgcgcccaccaccatgcgtacgaggtgcggcatgacgaggccgacgaaggcgatggaaccgctgacggcgaccatcacgcccgtcaccagggagacgagcacgagcagggacttgcggtgtcggtcggggctgatgcccaggctggctgcggtctcgtcaccgagagccaggacgtcgagcgggcggccgtgccggtgcaggacgaggacaccgagcagcacggcggcggtgaccaccggcagcgaaccccaggaagcggcgccgaagctgcccatggtccagtacaggaccatgctggtcgcctcggagctgggcgcgaagtagatgatgacactcatcacggcctggaaacccagcgacatggcgacaccggtcagtacgagccgcagcggcgagagcgcccccttggtggacgaggcgccgtacaccaggactgaggccacgagcgcgccgaggaaggcgcccacggacaccgcgtagatcccgaacacggcgagcccgcccatgaccgtcacaccgacggcgcccacggaggcccccgaggagacgcccagaacgaacgggtcggccagcgcgttgcgcaccagggcctggatggcgacaccgaccgcgctgagcccggcccccacgagcgccgcgagcaggacgcgcggggtgcggatctgccagatgatctggtacgtcgtcacctcgtccgccgagatcggcccgccactgagcgcggcccagaggaagcgcgcggtctcggccggggggaccacggcaggcccgagaccgatggcgacgacgacggagacgacgagcgcggcgaacaggctcacgcagatcgccaccaggcccgtccgggagccggtccgaaccggctcttgcgcggtgggcgcgggacgttgcagcgcctcgggtggcgcgggcggtgacat

SEQ ID NO: 51 - protein, 417 aa, Streptomyces roseosporus
VSAGTSRSAVAPEKSPEMPGDLKMARALWPVLVASAVGLLPFTVFSTYLVPIAEETGSGVAAVGGLRGLGGLAALAVGTALAPLIDRVPKSKAVAVGLVVLAVSSALGASGDFLLTAVFCLLVGAGTAVINPALTAAAADRFGDGKSAARAATLVTSTTSMTAMLAAPLIALPALLWGWEGDLLAVTVVSLLLAAVFLVRGRKGEDPVVEGGPRTGYFASFKALAQVRGSVPLLAISFLRTAVFMGYLAYLAVYYDDRFHLDPALFSLVWTLSGASFFVSNLLTGRITNAEKSTVGTEQLLLVGLLAALVTATGFWFTTWLPLALAFTSLHAASHAAVAACAVSLLVRRCGSMRGSALSLNAAGQSLGVFAGAALGGAGLGLAGYPGIAAAFGLLVAVAVVAGLLVLRSEDEIPGSA

SEQ ID NO: 52 - DNA, 1254 bp, Streptomyces roseosporus
ctacgccgaaccggggatctcgtcctcggagcgcagcaccaggagcccggccaccacggccacggcgacgagcagcccgaacgcggcggcgatccccgggtaccccgcgagcccgagtcccgctccgccgagggcggcgccggcgaagacgccgaggctctggcccgccgcgttgaggctcagcgcggaaccccgcatcgatccgcagcgcctgaccagcagactgacggcgcaggcggcgacggccgcgtggctagcggcgtgcagcgaagtaaaggccagggcgagcggcagccaggtcgtgaaccagaaaccggtagcggtgaccagggccgccaacagtccgacgagcaagagctgttcggtacccacggtggatttctcggcgttggtgatgcggcccgtgagcaggttgctgacgaagaacgaggcgccgctgagcgtccacaccagcgagaacagggcggggtcgaggtggaaccggtcgtcgtagtagaccgcgaggtaggcgaggtagcccatgaagaccgcggtgcgcaggaaggagatggcgagcagcggcaccgagccgcggacctgggccagggccttgaacgaggcgaagtagcccgtgcgcgggccaccctcgaccaccgggtcctcgcccttcctgccgcgtacgaggaagaccgcggcgagcagcagcgagacgacggtgacggcgagcaggtcgccctcccatccccacagcagggccggcagggcgatcaggggcgcggcgagcatcgccgtcatcgaggtcgtcgacgtgacgagggtggccgcacgggcggcggacttgccgtcgccgaaccggtcggcggcggcagcggtgagcgccgggttgatcaccgcggtgccggcgccgaccagcaggcagaacaccgcggtcaggaggaagtctccgctcgcgccgagggctgaggagacggcgagtacgacgagaccgaccgcgaccgccttcgacttgggtacccggtcgatcaggggggccagggccgtgcccacggcgagcgccgcgaggccccccaggccgcgcaggccgcccaccgcggcgacaccgctcccggtctcctcggcgatcggcaccagatacgtgctgaagacggtgaacggcagcaggccgacggcggaggccaccaggaccggccacagggctcgcgccatcttcaggtcgccgggcatctcgggggacttctccggtgcgacggccgaacgggaggtgccggcgctcac

SEQ ID NO: 53 - protein, 286 aa, Streptomyces roseosporus
MTPPPTRRKPSDMPFPTPQSVAELTDAVLAGDYGPDPKDMTVTSAFWLYHTTRLAGGPVTYHNHYLVLRVGRSFGGCSFEAGELTPDFCENASGHPLEKLLRHESAPVRIAALDAYLAQIQPHREAPEQEAVPLPVGTPEVRAKARDASIAGLLDIEEGAKVALIGVVNPLVAAIRERGGVCLPCDLNLRTTQWGEPVADDMTEVLAEAHAVVATGMTLSNGTFDLILEHCREQKVPLVVYAQTGSAVARAFLGSGVTALNAEPFPFSQFSADETTMYRYRAGGDL

SEQ ID NO: 54 - DNA, 861 bp, Streptomyces roseosporus
tcacaggtcaccgcctgcgcggtagcggtacatcgtcgtctcgtcggcgctgaactgtgagaacgggaagggctcggcgttcagggcggtgacgcccgagccgaggaacgcgcgggcgacggcgctgcccgtctgggcgtacacgacgagcggcaccttctgctcgcggcagtgttccaggatcaggtcgaaggtgccgttggagagtgtcatccccgtggcgacgacggcgtgggcctctgcgaggacctcggtcatgtcgtccgcgaccggctctccccactgggtggttcgcaggttgaggtcgcacggcaggcagacgccgccccgctcgcggatcgcggcgacgagcgggttgacgacgccgatgagcgcgaccttggcgccctcctcgatgtcgagcagcccggcgatggacgcgtcccgcgccttcgcccgcacctcgggggtccccaccggcagcgggacggcctcctgctccggggcttcccgatgcggctgtatctgtgcgaggtaggcgtcgagcgccgctatgcgcaccggggcggactcgtggcgcagcaacttctccagcgggtgcccggaggcgttctcgcagaagtccggggtgagttcgcctgcctcgaaggagcagccgccgaaggaccggccgacacgcagcaccaggtagtggttgtggtacgtcaccggtccgccggcgagccgtgtcgtgtggtagagccagaacgcgctggtgacggtcatgtccttcgggtcggggccgtagtccccggcgaggacggcatcggtgagctcggcgaccgactgcggcgtgggaaagggcatgtcagagggctttcttctggtcggaggtggagtcat

SEQ ID NO: 55 - protein, 337 aa, Streptomyces roseosporus
MYEHIAEAIKKPDLIALRPDLVCLRFETMKIYSALGAVRHLLESGTVKPGDTLVDSSSGIYAQALALACHRYGMKCHIVGSTTVDRTLKAQLEILGATLEQVRPSRNLRLDQELRVRRIAEILEENPSYHWMRQYHDSIHYYGYREVAETIADEVPAGPLTLVGGVGSGASTGAIASYLREAGRDVSLVGVQPFGSVTFGSEHVSDPDMIIAGIGSAIPFENVRHDLYDRIHWVSFDSALAGAVHLLRSSGIFAGLSAGAAYLTTRWERSKDDSRTYVFIAADTGHRYVDSAYAKHTEAPDIEDLEPREITSLDELSHPWSAMTWTDDSTSDQKKAL

SEQ ID NO: 56 - DNA, 1014 bp, Streptomyces roseosporus
tcagagggctttcttctggtcggaggtggagtcatcggtccacgtcatggcggaccaggggtggctgagctcgtcgagcgaggtgatctcgcgcggttcgaggtcctcgatgtcgggcgcctcggtgtgcttggcgtacgcgctgtcgacgtagcggtgacctgtgtccgccgcgatgaagacgtacgtccgggaatcgtccttcgaccgctcccaccgggtggtcaggtaggcggcgcccgcggacaggcctgcgaagatgccgctggagcggagcaggtggacggcgcctgcgagcgcggagtcgaagctgacccagtggatccggtcgtacagatcgtgccggacgttctcgaacgggatggcgctgccgatgccggcgatgatcatgtccgggtccgagacgtgctccgagccgaacgtgacgctgccgaagggctggactccgacgagggagacgtctcggcccgcctcgcgcagatacgaggcgatggcgcctgtcgacgcgccggaacccacgccgcccaccaaggtcaggggcccggcgggcacctcgtcggcgatcgtttcggccacttcgcggtagccgtagtagtggatgctgtcgtggtactgccgcatccagtggtacgaggggttctcctccaggatctcggcgatgcgccgcacccggagctcctggtcgaggcggagattcctggacggccgcacctgctcgagcgtggcaccgagaatctcgagctgcgccttgagcgtgcggtccaccgtggtcgaccccacgatgtggcacttcatgccgtagcggtggcaggcgagggcgagggcctgcgcgtagatgccgctcgaactgtcgacgagggtgtcaccgggtttgacggtgcccgactcaaggaggtgccgcaccgcccccagagccgagtagatcttcatggtctcgaaccgcagacagaccaggtccggccgcagtgctatgagatcgggtttcttgatcgcttcagctatgtgctcgtacat

SEQ ID NO: 57 - protein, 299 aa, Streptomyces roseosporus
MDTGVGTAYGTFGELLQGELPEEAGDFLVTLPVARWARASFRCDPAMGDVIVRPSHKEKARRLACLILEEAPGMTGGVLTVNSVIPEGKGLASSSADLVATARAVGRALRLDMPPSRIEGLLRLIEPTDGVLYPGIVAFHHRAVRLRAMLGSLPAMSVVGVDEGGAVDTVDFNRIPKPFTPADRREYADLLNRLSGAVRSRDLAEVGRVATRSALMNQPLRYKRLLEPMREICRDAGGLGVAVGHSGTALGVLLDAADPAYPHRATAVARACGDLAGAVAVYRTLSFPNAVSHGGRTVG

SEQ ID NO: 58 - DNA, 900 bp, Streptomyces roseosporus
atggacactggagtgggcaccgcctacggaacgttcggggaactgctccagggtgaactgccggaggaggcaggcgatttcctcgtcacgctgcctgtcgcccggtgggcgagggcgtccttccggtgcgacccggccatgggagatgtcatcgtcaggccgtcgcacaaggagaaggcgaggcggctggcctgcctgatcctggaggaggcaccggggatgaccggtggggtgctgacggtcaacagcgtgatcccggagggcaaagggctggccagttcatccgccgacctggtcgccacggcgcgcgcggtggggcgggccctgcggctcgacatgccgccatcgcggatcgaggggctgctgaggctgatcgaaccgaccgatggtgtcctgtacccgggaatagtcgccttccatcatcgagcggtgcgactgcgcgcgatgctgggctcgttgcccgccatgtcggtcgtcggtgtcgacgagggcggggccgtggacacggtcgacttcaaccgcatacccaagccgttcacgccggcggaccggcgtgagtacgccgacctgctgaaccggctgagtggggccgttcgctcacgcgacctcgcggaggtgggcagggtggcgacgcgcagcgcgctcatgaaccagccgcttcggtacaagcgactgctggagcccatgcgggagatctgcagggatgccggtggtctgggcgtggccgtgggccacagtgggacggcgctcggcgtgctcctggacgccgcggatcccgcgtacccgcaccgggccaccgcggtggcccgggcgtgcggggatctggccggggccgtcgcggtctatcggaccctcagtttcccgaacgccgtcagccatggtggtcggaccgtcggctga

SEQ ID NO: 59 - protein, 255 aa, Streptomyces roseosporus
MLTAQQPAPGVVPARIHVTDRLEAAHPLAADGAVVLTGVEPSGDGLVLAAAAVLGERLQQVFPHRLRASDGSNFVHLHADSFDFVVNVGGVEHRRRDPDEDYVLIQCVRQSDSGGDSFVADAYRFVDHCATADPELWDFLTRGDVDLYGAWSGLRGMPATPFVGRHVEYTRAGRRIVRRGDGVTPLHRDPGADHTRRMLARLEEAVHALEETLPRFRLDKGEILVLDNYRCWHGREAHTGDRAVRILTVRSSDAR

SEQ ID NO: 60 - DNA, 768 bp, Streptomyces roseosporus
atgctcaccgcacagcagcctgctcccggcgtcgtgcccgcccggatccacgtcacggacaggttggaggccgctcacccgctcgccgctgacggggctgtcgtcctgacaggcgtcgagccctccggtgacggcctggtcctcgccgccgcagccgtcctgggggagcggctgcagcaggtgttccctcaccggctgcgggcgtccgacggctcgaacttcgtccaccttcatgcggacagcttcgacttcgtcgtcaacgtagggggcgtcgagcatcgccgacgtgatccggatgaggactatgtcctcatccagtgcgtccggcagtccgactccggcggcgactccttcgtggctgacgcctatcgcttcgtggaccactgcgcgacggccgatcctgaactgtgggacttcctgacccgaggggacgtcgacctgtacggcgcgtggtccggactgcgtggtatgcccgcaaccccctttgtgggcaggcatgtcgagtacacccgcgccggtcggcgtatcgtccggcgcggcgacggggtgacccctctgcaccgggaccctggcgcggaccacacccggcggatgctcgcccgtctggaggaagccgtccatgcgctggaggagacgctcccgcgattccggctcgacaagggcgaaatcctcgtcctggacaactaccgctgctggcacggccgcgaggctcacacgggagatcgcgcggtacgtatcctcacggtgcgcagcagcgacgcccgctga

SEQ ID NO: 61 - protein, 247 aa, Streptomyces roseosporus
MTTMFNNNPPFPPATELRNERVRFQRLSAGYPGRPVLHQLSAAIPPLAMTALVGPNGSGKSTLLGVLAGVITATSGQLRYAEGSPPAFVPQRGAVGDTLPLTARQTVEMGRWGQRGLWRRLTRTDRTAVDSAMERLGVADLGARQLGELSGGQRQRVLIAQGLAQQSDLLLLDEPTTGLDPEARERITALLTDLVADGTTVVQATHDLDAARSADACLLLADGRLIGQGSPEEVLTPEALARIWQPA

SEQ ID NO: 62 - DNA, 744 bp, Streptomyces roseosporus
tcacgccggctgccagatccgggccagtgcctccggggtgagtacttcctccggtgatccctgcccgatcagtcgtccgtcggccaggagcaggcaggcgtcggccgagcgggcggcgtccaggtcgtgggtggcctggacgacggtggtgccgtcggcgaccaggtccgtcagcagggccgtgatccgctcccgcgcctcggggtcgagtccggtggtcggctcgtccaggagaagcaggtcggactgttgggcgaggccctgcgcgatcagcacgcgctgacgctggccgcccgacagctcgccgagctggcgggcgccgaggtcggcgacccccagcctctccatggcggagtcgaccgcggtccggtccgtgcgggtcagccgccgccacaggccccgctgtccccagcggcccatctccaccgtctgccgcgccgtgagggggagggtgtcgccgacggcaccgcgctgcgggacgaaagccggcggggagccctctgcgtaccggagttgtccggatgtggcggtgatcactccggccaggacgcccagcagcgtcgacttgccgcttccgttgggtccgaccagggcggtcatggccaacggcggtattgcggcgctgagttggtggagcacggggcggccggggtagccggcgctcagccgctggaaccggacgcgttcattccgcagttcggtggccggcgggaacggagggttgttattgaacatggttgtcat

SEQ ID NO: 63 - protein, 319 aa, Streptomyces roseosporus
MEWLTAPFEVAFVQRALWAGILVSAICALAGTWVVLRGMAFLGDAMSHGLLPGVAVASLLGGNLLVGAVVSAAVMAAGVTALGRTPRLSQDTGIGLLFVGMLSLGVIIVSRSQSFAVDLTGFLFGDVLAVRGSDLLLLGVALLLALAVSVLGYRAFLALAFDERKARTLGLRPRLAHAVLLGLLALAIVASFHIVGTLLVLGLLIAPPAAAMPWARSVQAVMVLAALLGAAATFGGLLLSWHLRTAAGATVSALAVALFFLSHLASGLRHRRRARRGGLAEPAVAPGRDLLHVLTERNLRRSPCSSEKTSHRWLRRLRP

SEQ ID NO: 64 - DNA, 960 bp, Streptomyces roseosporus
atggagtggttgacggcccctttcgaggtggcctttgtgcagagggccctatgggccgggatcctggtgtcggcgatatgcgccctcgcgggaacgtgggtggtgctgcgcgggatggccttcctcggtgacgcgatgtcgcacgggctgctgcccggcgtcgcggtcgcctccctgctgggaggcaacctgctggtgggggcggtggtgagcgcggccgtgatggcggcgggcgtcacggccctcgggcggactccgcgactgtcccaggacaccggcatcggcctgctgttcgtgggcatgctgtcgctcggcgtcatcatcgtgtcgcggtcgcagtccttcgcggtggacctcaccggcttcctgttcggagacgtcctcgccgtgcgggggagcgatctgctgcttcttggagtagccctgctgctggcgctggccgtctcggtgctcggctaccgggctttcctggccctcgcgttcgacgagcgcaaggcccggacactcgggctgcgtccccggctcgcccatgccgtgctgctcggcctgctggcgctggccatcgtggcctccttccacatcgtgggcacgctgctcgtcctcggtctgctcatcgccccgcccgcggcggccatgccctgggcgcgaagcgtccaggcggtcatggtcctcgcggcgctcctcggcgccgccgccaccttcggcggcctgctcctgtcctggcatctgcgcaccgcggccggagcgaccgtctcggccctcgccgtcgctctcttcttcctgtcccacctggcatccggacttcggcaccgccgccgtgcgcgccggggcggtcttgccgaaccggcggtcgccccgggccgcgacctcctccacgtcctgaccgagagaaacctgaggcgatctccttgctcgtccgaaaaaacgtcacatcgctggctccggcgcttgcggccgtga

SEQ ID NO: 65 - protein, 396 aa, Streptomyces roseosporus
VILLTAGCGGGDEAKSGSGPASSSPTPHGYVEGATEAAEQQSRLLLGDPGSGETRVLDLITGKVYDIARSPGATALTTDGRFGYFHGPDGIRVLDSGAWMVDHGDHVHYYRAKIKEVGELPGGTGTSIRGDAGVTVASSADGKASVYRRADLEKGALGTPSPLPGTFAGAVVPYAEHLVTLTAESGAPAKVAVLDRSGKRVAAPEAECEEPQGDAVTRRGVVLGCADGALLVHEDDGAFTAEKIPYGEDVPKTERAVEFRHRPGSSTLTAPAGKDAVWVLDAGEGAWTRVKTGPVVAANTAGEGSPLVVLETDGALHGYDIPTGKETGVTDPLLKELPGTGAGGGAAPVIEVDRSRAYLNDPEGKRVYEIDYNDDLRVARTFDVDVRPSLMVETGR

SEQ ID NO: 66 - DNA, 1191 bp, Streptomyces roseosporus
gtgatcctcctgaccgccggatgcgggggcggggacgaggccaagtccggttccgggcccgcctcttcgtcccccactccgcacggctatgtcgaaggcgccaccgaggcggccgagcagcagtccagacttctgctcggcgaccccgggagcggtgagacccgcgtgctggacctgatcaccggcaaggtgtacgacatcgcccgcagccccggtgccaccgcactcaccacggacggccgcttcggctacttccacggcccggacggcatacgggtgctcgacagcggtgcgtggatggtggaccacggcgaccacgtccactattaccgcgcgaagatcaaggaggtcggcgaactcccgggcggcaccggtacgagcatccgcggcgacgcgggcgtgaccgtggcctcgtcggcggacgggaaggcgagcgtgtatcgcagggcggacctggagaaaggcgccctgggcacgccgtccccgctgcccggcacgttcgccggcgccgtcgtgccgtacgcggaacacctggtgacactcaccgctgagagcggggctccggcgaaggtcgccgtgctggaccgttccggcaagcgcgtcgccgctccggaggcggagtgcgaggagcctcagggcgacgcggtcacccggcgcggggttgtcctcggctgcgccgacggcgctctgctcgtccatgaggacgacggcgccttcacggcggagaagattccgtacggcgaggacgtgccgaagaccgagcgggccgtggagttccggcaccgcccgggcagcagcaccctcacggcacccgccggcaaggacgctgtctgggtcctggatgccggcgagggcgcctggacccgggtgaagaccggccccgtggtcgccgccaacacggccggcgaaggctcgccgctggtcgtcctggagaccgacggggccctgcacggctacgacatacccaccggcaaggagaccggcgtgaccgatcccctgctcaaggaactgcccggaaccggtgcgggcggcggcgcggctccggtgatcgaggtggaccgcagccgggcctacctcaacgaccccgagggcaagcgcgtgtacgagatcgactacaacgacgatctccgcgtggcccgtacgttcgacgtcgacgtacggccgtccctgatggtggagacgggccgatga

SEQ ID NO: 67 - protein, 320 aa, Streptomyces roseosporus
MSARVGAPRMRALLVSLAGFFVVAGAATGCAGGGDERPRVVVTTNILGDITREIVGDEAGVSVLMKPNADPHSFGLSAVQAAELENADLVVYNGLGLEENVLRHVEAARESGVAAFAAGEAADPLTFHAGQDGGPEEDAGKPDPHFWTDPDRVREAAGLIADQVAEHVEGVDEKKVRENAERYDGQLADLTGWMEKSFAAIPEDRRALVTNHHVFGYLADRFGLRVIGAVIPSGTTLASPSSSDLRSLTQAMEKAKVRTVFADSSQPTRLAEVLRQEMGGDVDVVSLYSESLTEKGKGAGTYLEMMRANTSAMAEGLTGD

SEQ ID NO: 68 - DNA, 963 bp, Streptomyces roseosporus
atgagcgcgcgcgtgggcgctccacggatgcgtgccctgctggtgtccctggccggattcttcgtcgtcgccggtgcggcgaccggctgcgcgggcggcggagacgaacggccccgggtcgtggtgaccaccaacatcctcggcgacatcacccgggagatcgtcggggacgaggccggcgtcagtgtcctgatgaagcccaacgccgacccgcactccttcggcctctcggccgtgcaggccgctgagttggagaacgccgacctggtcgtctacaacgggctcggcctggaggagaacgtgttgcggcacgtggaggctgcccgcgagtccggagtggccgccttcgccgcgggtgaggcggccgacccgctcaccttccatgccggacaggacggcggccccgaagaggacgccggcaagcccgatccgcacttctggaccgaccccgaccgcgtacgcgaggccgccggcctgatcgccgaccaggtcgccgagcatgtggagggcgtcgacgagaagaaggtccgggagaacgccgagcggtacgacggacaactcgccgacctcacgggatggatggagaagtccttcgccgccatccccgaggaccggcgtgccctggtgaccaaccaccacgtcttcggctacctcgccgaccgcttcggcctccgcgtcatcggcgcggtcatccccagcggaaccacgctcgcctcgcccagctcctccgacctgcgctctctcacccaggccatggagaaggccaaggtgcgcaccgtcttcgccgactcctcccagcccacccggctcgccgaggtcctgcgccaggagatgggcggcgacgtggacgtcgtctcgctctactccgagtcgctgaccgagaagggcaagggcgccggaacctacctggagatgatgcgcgccaacacctccgccatggccgagggcctcaccggcgactga

SEQ ID NO: 69 - protein, 401 aa, Streptomyces roseosporus
MNKPTRARVFTGTALVVAASMALTACGGNGNDDAPSGKEPKEQKSSEAAAVGNPIVASYDGGLYVLDGETLKLAKTIALPGFNRVNPAGDNEHVVVSTDSGFRVFDATRQEFTDAEFKGSKPGHVVRHGGKTVLFTDGTGEVNVFDPADLSDGKKPDGRTYTSAKPHHGVAIELAGGELVTTLGTEEKRTGALVLDKDNKEIARAENCPGVHGEAAAQGEVAGFGCEDGVLLYKDGKFTKVDAPGDYARTGNQAGSDASPILLGDYKTDPDAELERPTRISLIDTRTAKMKLVDLGTSYSFRSLARGPHGEALVLGTNGTLHVIDPETGKVEKKIDAVGDWTEPLDWQQPRPTLFVRDHTAYVSEPGKRQLHSIDLESGKKLASVTLPKGTNELSGTVAGH

SEQ ID NO: 70 - DNA, 1206 bp, Streptomyces roseosporus
atgaacaagcccacccgcgccagagtcttcacgggcacggcgctggtcgtggcggcgtcgatggcgctgaccgcctgcggcggcaacggcaacgacgacgccccttccggcaaagagcccaaggagcagaagagcagcgaggccgcggcggtcgggaacccgatcgtcgcctcgtacgacgggggactgtacgtcctcgacggcgagaccctgaagctcgcgaagacgatcgcactgcccggcttcaaccgggtcaacccggcgggcgacaacgagcacgtcgtcgtctccacggactccggcttccgcgtgttcgacgccacccgacaggagttcaccgacgccgagttcaagggttccaagccggggcacgtcgtccggcacggcggcaagacggtcctgttcaccgacggcacgggagaggtgaacgtcttcgaccccgccgacctgtccgacgggaagaagccggacggccgcacctacacgtccgcgaagccccaccacggtgtcgccatcgaactggccggcggagaactcgtcaccaccctcggcaccgaggagaagcgcaccggagccctcgtcctggacaaggacaacaaggagatcgcacgcgccgagaactgccccggagtgcacggcgaggccgccgcccagggcgaggtggccggcttcggctgcgaggacggcgtcctgctctacaaggacggcaagttcaccaaggtcgacgcccccggcgactacgcccgcaccggcaaccaggccggcagcgacgcctccccgatcctcctcggcgactacaagaccgaccccgacgccgaactggaacgccccacccgcatatccctgatcgacacccgtacggcgaagatgaagctggtcgacctcggcaccagctactccttccgctccctcgcccgcggcccgcacggcgaagccctcgtgctcggcaccaacggcaccctccacgtcatcgacccggagaccggaaaggtcgagaagaagatcgacgcggtcggcgactggaccgagcccctggactggcagcagcccaggcccaccctgttcgtccgggaccacacggcgtacgtctccgaaccgggcaagcgccaactccactccatcgacctggaatcggggaagaagctggcatccgtcaccctgccgaagggcaccaacgaactgtccggcacggtcgccggtcactga

SEQ ID NO: 71 - protein, 206 aa, Streptomyces roseosporus
VSWMNDVLTAVSDMNPVTRFALASVFAFAESGLGAGMAVPGEVAVLALSAGTEGTRPLLALFLVVTLSSSAGDHIGYFLGIRYGQRMRETRLVRRIGQHHWDRAQELCHRYGARAVFLTRLLPVVRTLTPATAGVGSVRYLRFLPASLAGAAMWSALYVSAGTLVSTSLREAESVLSTILWALLGVAAAFTLAIVWWRRRHRRRSS

SEQ ID NO: 72 - DNA, 612 bp, Streptomyces roseosporus
tcacgagctgcggcggcggtgcctgcgccgccaccacacgatcgcgagcgtgaaggcggccgcaacgcccagcagggcccacaggatggtggagagcacgctctcggcctcgcgcagggaggtcgagaccagtgttcccgcggacacgtagagcgcggaccacatcgcggctccggcgagggaggcgggcaggaagcggaggtagcgcacggagccgacgccggcggtcgcgggggtgagggtgcgtaccacgggcaaaaggcgggtcaggaagacggcgcgcgccccgtaccggtggcagagctcttgcgcgcggtcccagtggtgctgcccaatccgccgtaccaggcgcgtctcccgcatccgctgcccgtagcggatgccgaggaagtagccgatgtggtcgccggccgagctgctgagtgtgacgacgaggaagagggccaacagcgggcgtgtcccctccgttccggcgctcagggccagtaccgcgacctcgccggggacggccatgccggccccaaggccggattccgcgaacgcgaatacggaggccagcgcgaatctggtgaccgggttcatgtccgacaccgctgtcagtacatcgttcat

SEQ ID NO: 73 - protein, 60 aa, Streptomyces roseosporus
MELCALHSRDRDATVKTCAAGRPKRKPSYGFLGRPTAAEELAAVTSCGGGACAATTRSRA

SEQ ID NO: 74 - DNA, 183 bp, Streptomyces roseosporus
atggaactgtgcgcgctccactccagggaccgtgacgccaccgtcaagacctgtgccgccggccgcccgaaacgcaagccgtcgtacggcttcctgggccgtcccacagccgccgaggagctcgccgcggtcacgagctgcggcggcggtgcctgcgccgccaccacacgatcgcgagcgtga

SEQ ID NO: 75 - protein, 319 aa, Streptomyces roseosporus
MGGSAIRTRQLTKHFGAVQALVGVDLEVPAGSVLGLLGHNGAGKTTLIQILSTVLPPSGGSAEVAGFDIVRDARRVRACIGVTGQFAALDEHLSGLANLVLISRLLGARPREARRRAAELVEQFGLTEAADRPMRTYSGGMRRRIDLAASLVARPSVLFLDEPTTGLDPVSRTALWETVEGLVAEGTTVLLTTQYLDEADRLADRIAVLSSGHVVTVGTAAELKAAGTRSVRLTFGSAADLESAEGALRLEGLGLTTDPVSRTVSLPLAATAELAGIFRILGAAGVELAELALKEPTLDDVYLSLAESWETTSGGTVRC

SEQ ID NO: 76 - DNA, 960 bp, Streptomyces roseosporus
atgggcgggagcgcgatcaggacccggcagctgaccaagcacttcggtgcggtgcaggcgctggtcggcgtggatctggaggtgcccgcggggagcgtgctggggctcctgggacacaacggtgccgggaagaccacgctgatccagatcctctcgacggtgctccccccgtccggtgggtccgccgaggtcgccggcttcgacatcgtgcgcgatgcccgacgggtacgcgcctgtatcggggtgacggggcagttcgctgccctggacgagcatctgtccgggctcgccaatctggtgctgatctcccggctgctgggtgcccggccgagggaggccagacgccgggcggccgaactggtcgaacaattcggtctcaccgaggcagcggacagaccgatgcggacctactccggcggaatgcggcggcgcatcgacctggcggcgagtctggtggccaggccctcggtgctgttcctcgacgagcccaccaccgggctggacccggtgagccgcaccgcactctgggagacggtggaagggctggtcgccgagggcacgacggttctgctgaccacccagtacctcgacgaggccgaccggctggcggaccggatagcggtgctgtcgtccggccacgtggtgacggtcggcacggcggcggagctcaaggcggcgggcacccggtccgtccgcctgaccttcgggtccgcggcggatctggagagcgcggaaggagcgctgcgcctggagggcctcggcctcacaacggatccggtgtcccggacggtgtcactgccgctggcggcaacggccgagctggccgggatcttccggattctcggcgcggcgggcgtggagctcgccgaactggcgctcaaggagcccacgctggacgacgtgtatctgagcctggcggagagctgggagaccacgagcgggggaacggtccggtgctga

SEQ ID NO: 77 - protein, 288 aa, Streptomyces roseosporus
LTTRRTGPGTSPVADGPGWRGGGAGIGTQFRVLTGRQFRIIYGDRRIALFSLLQPIIMLMLFSQVLGRMANPEIFPPGVRYLDYLVPALLLTTGIGSAQGGGLGLVRDMESGMMVRLRVMPVRLPLVLVARSLADLARVALQLVALLACAMGPLGYRPAGGVSGIVGATLLALLVAWSLIWVFLALAAWLRSIEVLSSIGFLVTFPLMFASSAFVPLDILPGWLRVIATVNPLTYAVEASRDLALDHSALGAALAAVGTSLALLAVTGLLAVRGLRRPPGAGGPHRTP

SEQ ID NO: 78 - DNA, 870 bp, Streptomyces roseosporus
gtgctgaccacacgacgtacgggtccggggacctcgccggtggcggacgggcccgggtggcgcggcgggggtgcggggatcggcacccagttccgggtgctgaccggccggcagttccggatcatctacggggaccggcggatcgcgctgttcagcctgctccagccgatcatcatgctcatgctgttcagtcaggtgctgggccgcatggccaatccggagatcttcccgccgggtgtgcgctacctcgactacctggtgccggctctgctgctgacgaccgggatcggttccgcgcagggcggcgggctgggtctcgtcagggacatggagtccgggatgatggtccggctgcgggtgatgccggtacggctgccgctggtcctggtggcccggtcgctggccgatctggcgcgggtcgccctgcagctcgtggcgttgctcgcctgtgcgatggggccgctgggctaccggccggccgggggcgtgtcggggatcgtcggcgcgacgctgctcgcgttgctcgtcgcgtggtcgctgatctgggtgttcctggccctcgccgcgtggctgcggagcatcgaggtgctgtccagcatcgggttcctcgtcaccttccccctgatgttcgcgtcgagtgccttcgtcccgctcgacattctgccgggatggctcagggtcatcgcgacggtcaatcccctcacgtacgcggtggaggcgtcccgcgatctggcgctggaccacagcgcgctgggcgcggcgctcgcggccgtcggcaccagtcttgcgctcttggcggtgaccggtctgctggcggtacgcgggctgcggcgcccgccgggtgcgggcggcccgcaccggacgccctga

SEQ ID NO: 79 - protein, 75 aa, Streptomyces roseosporus
MANPFENNDGSYLVLVNDEGQYSLWPAFADVPAGWTVTFGESSRQECLDHINENWTDMRPKSLIRQMENDRTTAA

SEQ ID NO: 80 - DNA, 228 bp, Streptomyces roseosporus
atggccaaccccttcgagaacaacgacggcagctacctcgtactggtcaacgacgagggccagtactccctttggcccgcgttcgccgatgtcccggcgggctggaccgtcaccttcggcgagagcagtcggcaggaatgcctcgaccacatcaacgagaactggaccgatatgcgccccaagagcctcatccggcagatggagaacgaccggacgaccgcggcctga

SEQ ID NO: 81 - protein, 328 aa, Streptomyces roseosporus
MTVHDYHVTVKEQHPALFELLDPARLVAVTDEPWVTEGNEFDDDHAGRGVSYRCAQQHGEARRTGIETILGMFAGPGGLRDMGRVLDVLGGEGLLSRVWRQLAGAGDGDSVPLVTGDLSGHMVAAALRSGLPAVRQPADRMLQRDHCLDGVLFAYGTHHVDRSVRPRMLTEASRVLAPGGRVVLHDFAEGSPEERWFREVVHPRSLAGHAYDHFTAHEMTGYLADAGFTDITVGPVYDPMTLTGETDESALARLVSYMTSMFGILPDGDRSNERTEAALRDIFRFSAGDLPEDVPRDEAVLELTVRPHGNAFRAELPRIALVAHGRKP

SEQ ID NO: 82 - DNA, 987 bp, Streptomyces roseosporus
atgaccgtgcacgactaccacgtgaccgtcaaggaacagcacccggcgctcttcgagctcctggaccccgcacgcctcgtcgccgtcacggacgagccttgggtcacggagggaaacgagttcgacgacgaccacgccggccgcggcgtctcctaccgctgtgcccagcagcacggcgaagcccgccgcaccggcattgagacgattctcggcatgttcgccggccccggcgggctgcgcgacatgggccgtgtcctcgatgtactcggaggcgaaggcctgctcagccgcgtgtggcggcaactggccggcgccggcgacggggactccgtgccactggtcaccggagacctcagcggccacatggtggccgcagccctccggtccggcctgcccgccgtacgccagccggccgaccgcatgctgcagcgagaccactgcctggacggcgtgctcttcgcgtacggcactcaccacgtcgaccgctctgtacgcccccgcatgctgacagaggcctcccgggtcctggcccctggaggccgcgtcgtcctccacgacttcgcggagggatcccccgaagaacgctggttccgcgaagtcgtccacccccgctccctcgcgggccacgcgtacgaccacttcaccgcccacgagatgaccggctacctcgccgacgcgggcttcaccgacatcaccgtcggccccgtgtacgacccgatgaccctgaccggggagaccgacgagagcgcactggctcggctcgtctcctacatgacctcgatgtacggcatcctgcccgacggcgaccggagcaacgagcggacggaagccgccctccgcgacatcttccgtttctcggccggcgacctccccgaggacgtcccccgcgacgaggcggtcctggaacttaccgtccgtccgcacggcaatgccttccgggccgagctcccccggatagccctcgtcgcccacggacgcaaaccatga

SEQ ID NO: 83 - protein, 244 aa, Streptomyces roseosporus
  MOD_RES (141): Variable amino acid
MTAQDTRTTGSDGGGRGATYHESPTYGELLRLEDLLNVAHLRDAAAPVLFLATHQSAEIWFGIVLRHLEEIRAALTDDDPDTALHLLPRLPEIFELLVRHFDMLATLSTEEFGKIRAGLGTASGFQSAQYREIEFLCGLRXHRHISTPGFTETERRDCGNGPASPPWRRLRRLPDPMRQREGRERIGEALLRFDERVTVWRARHAALAERFLGPLEGTAGTAGADYLWRVTRHRLFPPEAWGAG

SEQ ID NO: 84 - DNA, 738 bp, Streptomyces roseosporus
atgacagcgcaggacacccggacgaccgggagtgacggtggcggccggggcgccacgtaccacgagagcccgacctacggggagctgctgcgcctggaggacctgctgaacgtcgcgcacctgcgcgacgcggccgccccggtcctcttccttgccacgcaccagtcggcggagatctggttcggcatcgtgctgcgccacctggaggaaatccgcgcggccctcacggacgacgacccggacacggcactgcatctgctgccgcgactgccggagatcttcgaactgctcgtccgccacttcgacatgctggccacgctgagtacggaggaattcggcaagatccgcgcggggctgggcacggcgagcggcttccagtcggcgcagtaccgggagatcgagttcctgtgcggtctgcgcgaccaccgccacatctccacaccgggcttcacggaaaccgaacgtcggcgactgcgggaacgggcccgccagccctccgtggcggaggcctacgacgccttccggacccgatgcgccaacgggaaggacgcggaacggatcggggaagcgctcctgaggttcgacgaacgggtcaccgtctggcgcgcccgccacgcggccctggcggaacgcttcctgggcccccttgaagggacggccggcaccgccggagccgactacttgtggcgggtcacccggcacaggctcttccccccggaggcgtggggcgccggctga

SEQ ID NO: 85 - protein, 321 aa, Streptomyces roseosporus
MDREAEAPLRAAPHATPAERAALGKAARREAPRSGHAEFSPSPRRPDPLTVLEAQSADRVPELVPIRYARMTESPFRFYRGAAALMAADLAGTPVSGIRAQLCGDAHLLNFRLLASPERNLLFDINDFDETLPGPWEWDVKRLAASLVIAGRANSFTLRERAGVVRATVRSYREAMARFAGMRNLDVWYARTDAERLRTVATEQLGGRGRRNVDRALGKARSRDSLQAFGKLAEVVDGRLRIAADPPMVVPLTDLTPGVDRDAVFRQFGSMLAGYARSLPSDRRSLLEDFALVDVARKVVGVGSVGTRCWIVLLLGRDGGD

SEQ ID NO: 86 - DNA, 965 bp, Streptomyces roseosporus
ggatccccgccgtcccggccgagcagcaggacgatccagcaccgggtgccgacactgcccacaccgacgaccttccgggccacgtccaccagcgcgaagtcctccagcagactgcgccgatcggatggcaggctgcgtgcgtaccccgccagcatggagccgaactgccggaacaccgcgtcccggtccacccccggcgtcagatcggtcagcgggacgaccatcggcggatccgccgcgatccgcagccgcccgtcgaccacctcggcgagcttcccgaacgcctgaaggctgtcccgggaccgggccttccccaacgcccggtcgacattcctgcgcccccgcccgcccaactgttccgtggccaccgtgcgcagccgctcggcatccgtccgcgcgtaccagacgtccagattgcgcatgcccgcgaaccgggccatcgcctcccggtacgagcggaccgtggcccggacgaccccggcccgctcccggagcgtgaagctgttcgcccgccccgcgatgacgaggctcgccgcgagccgcttgacgtcccactcccagggacccggcagcgtctcgtcgaagtcgttgatgtcgaacaggagattccgctcgggggaggccagcagccggaagttcagcagatgggcgtcaccgcacaactgcgccctgattcccgacaccggggtgccggccaggtcggcggccatcagcgcggccgctccccggtagaagcggaacggggactccgtcatccgggcatagcggatcgggaccagctcgggaacccggtccgccgactgggcttcgaggacggtcagcggatcggggcggcgcggcgacggggagaactccgcatggcccgaccggggcgcctcacggcgggccgccttgcccagtgccgcccgttcggccggtgtcgcgtgcggtgcggcgcgcagcggcgcctcggcttcccggtccat

SEQ ID NO: 87 - protein, 319 aa, Streptomyces roseosporus
MIHIRAVSPPDLTDEVVGLLSADPCVLNLIVQRDAARRPDGDAIACDVLTGAANDVLHRLRAAHLDRRGSLVIEPVDMAFSGAATEGGQRELGPLSRAPVWEQVEARIRSGGRYPPSFYLYLVIAGLIGSVGIVTNSQILIVGAMVVGPEYGAIVSVALGIDRRHRSMVRSGLAALGVGLLLTIVVTFLFALLIRGFGLESEAFDRGLRPVSHLINTPNFFSVAVATLAGIVGIVSLTEARTSALLGVFISVTTIPAAADIAVSTAYTSWSDVRGSAIQLVVNILVLIVVGAFALKAQRAIWQRVRLRRDRERRIAEQA

SEQ ID NO: 88 - DNA, 960 bp, Streptomyces roseosporus
tcaggcctgttcggcgatccggcgctcacggtcgcggcggaggcggacccgctgccagatcgcccgctgggccttgagcgcgaacgcgcccaccacgatcagcacgaggatgttgacgacgagctgtatggccgagccccgtacgtcggaccagctggtgtacgccgtggagacggcgatgtccgcggcggccgggatcgtcgtcacggagatgaacaccccgagcagagcactggttctggcctcggtgagcgacacgatcccgacgattccggccagggtggcgacggcgacggagaagaagttcggcgtgttgatgagatgggagacgggccgcagcccccggtcgaacgcctccgactccagcccgaaaccccggatgaggagggcgaagaggaaggtgaccacgatggtcaggagaaggccgacgcccagggcggccagcccgctgcgcaccatggaccggtggcgccggtcgatccccagcgccacgctgacgatggcgccgtactccgggccgacgaccatcgccccgacgatcaggatctgcgagttggtgacgatgccgaccgacccgatcagaccggcgatgaccaggtagaggtagaagctcggcggataccggcccccggacctgatgcgggcctcgacctgttcccagaccggcgcccggctcagcggccccagctcgcgctgcccgccctcggtggccgcgccggagaaggccatgtcgacgggttcgatgacgagggagccccgccggtcgaggtgggcggcgcgcagccggtgcagtacgtcgttggccgcccccgtcagtacgtcgcaggcgatggcgtcgccgtcggggcggcgcgcggcgtcgcgctggacgatcagattgagcacgcacgggtcggccgagagcaggccgacgacctcgtcggtcaggtccggcgggctcaccgcgcggatgtggatcat

SEQ ID NO: 89 - protein, 97 aa, Streptomyces roseosporus
VTRPGWDHEGVDTPDTPDAFPEPLPGADEAVREERATDDGTPEGRRLVRCRLCGRPLTGADSRRAGLGPSCDAKLHPAPPDIRTRRHEVDQDPLPGT

SEQ ID NO: 90 - DNA, 294 bp, Streptomyces roseosporus
gtgacccgcccgggctgggatcatgaaggggtggacacccccgacacacccgatgccttccccgaaccgctgcccggggccgacgaagcggtccgggaggagagggccaccgacgacgggacgccggagggccgccgcctcgtccgctgccgtctctgcggccggcccctgaccggggccgactcgcggcgggccggcctcggcccgtcctgcgacgccaagctgcacccggcgccgccggacatccgcacccgccgccacgaggtcgaccaggacccgctgccgggcacctga

SEQ ID NO: 91 - protein, 290 aa, Streptomyces roseosporus
MTNPAERLVDLLDLERIEVNIFRGRSPEESLQRVFGGQVAGQALVAAGRTTDGERPVHSLHAYFLRPGRPGVPIVYQVERVRDGRSFTTRRVTAVQEGRTIFNLTASFHRPEEAGFEHQLPPARIVPDPEELPTVAEEVREHLGALPEALERMARRQPFDIRYVDRLRWTKDEIQDADPRSAVWMRAVGPLGDDPLVHTCALTYASDMTLLDAVRIPVEPLWGPRGYDLASLDHAMWFHRPFRADEWFLYDQESPIATGGRGLARGRIYDRSGQLLVSVVQEGLFRRLEQ

SEQ ID NO: 92 - DNA, 873 bp, Streptomyces roseosporus
ctactgctccagccgccggaacagcccctcctgcaccaccgacaccagcagctgccccgaacggtcgtagatccgcccccgcgccaggccccgcccgcccgtggcgatcggcgactcctggtcgtacaggaaccactcgtccgcccggaacggccggtggaaccacatggcgtggtccagggacgcaaggtcatatccgcgcgggccccacagcggctccaccgggatacggaccgcgtccagcagcgtcatgtcgctcgcgtacgtcagcgcgcacgtgtgcaccagcgggtcgtcgcccagcgggcccaccgcccgcatccacaccgcgctgcgcggatcggcgtcctggatctcgtccttcgtccagcgcagccggtcgacgtaacggatgtcgaagggctggcggcgggccatccgctccagcgcctccggcagcgcgcccagatgctcgcgcacctcctcggcgaccgtcggcagctcctccgggtccgggacgatccgggcgggcggcagctggtgttcgaagcccgcctcctcggggcggtggaaggacgccgtcaggttgaagatcgtccggccctcctggaccgccgtcacccgacgggtggtgaaggaccggccgtcccgcacccgctccacctggtagacgatcggcacaccgggacgccccggccgcaggaaataggcgtgcagcgagtgcaccggccgctccccgtcggtggtccggcccgccgccaccagcgcctggcccgcgacctgcccgccgaagacccgttgcagggactcctccgggctgcgcccccggaagatgttgacctcgatccgctccaggtcgagcaggtcgaccagacgctcggccggattcgtcat

SEQ ID NO: 93 - protein, 857 aa, Streptomyces roseosporus
VIFVPSAGSLIRAEDRQDGGVTLIDQLPQTADPDALFEAFSSWTESQGITMYPAQEEALIEVVSGANVILSTPTGSGKSLVAAGAHFTALAQDKVTFYTAPIKALVSEKFFDLCKLFGTENVGMLTGDASVNADAPVICCTAEVLASIALRDGKYADIGQVVMDEFHFYAEPDRGWAWQIPLLELPQAQFVLMSATLGDVSMFEKDLTRRTGRPTSVVRSATRPVPLSYEYRFTPITETLTELLDTRQSPVYIVHFTQAAAVERAQSLMSINMCTKEEKEKIADLIGSFRFTTKFGQNLSRYVRHGIGVHHAGMLPKYRRLVEKLAQAGLLKVICGTDTLGVGVNVPIRTVLFTALTKYDGNRVRTLRAREFHQIAGRAGRAGFDTAGFVVAQAPEHVIENEKALKKAGDDPKKKRKVVRKKAPEGFVAWSESTFDKLIQSEPEPLTSRFRVTHTMLLAVIARPGNAFEAMRHLLEDNHEPRRAQLRHIRRAIAIYRSLLDGGVVEQLDTPDAEGRIVRLTVDLQQDFALNQPLSTFALAAFDLLDAESPSYALDMVSVVESTLDDPRQILAAQQNKARGEAVGQMKADGVEYEERMERLQEVTYPKPLSELLWHAYDVYRTSHPWVNDHPVSPKSVIRDMYERAMTFTEFTSHYELARTEGIVLRYLASAYKALEHTIPDDVKSEDLQDLISWLGEMVRQVDSSLLDEWEQLANPEVETAEQAQEKADEVKPVTANARAFRVLVRNAMFRRVELAALDRAGALGELDGESGWDEDAWGEALDAYWDAHEEIGTGPDARGPKLLKIEEDPAHGLWRVWQAFADPAGDHDWGIKAEVDLAASDEEGRAVVRVTEVGQL

SEQ ID NO: 94 - DNA, 2574 bp, Streptomyces roseosporus
tcacagctggccgacctcggtgacccggacgaccgcccggccctcctcgtcggacgccgcgaggtccacctcggccttgatgccccagtcgtgatcgcccgccggatcggcgaacgcctgccagacccgccacagcccgtgcgccgggtcctcctcgatcttcagcagcttcgggccccgcgcgtccggaccggtcccgatctcctcgtgcgcgtcccagtacgcgtccagcgcctcgccccacgcgtcctcgtcccacccggactcgccgtccagctcgcccagcgcgccggcccggtccagcgcggccagctccacccggcggaacatcgcgttgcgcaccagcacccggaaggcgcgcgcgttcgccgtgaccggcttgacctcgtccgccttctcctgagcctgctccgcggtctccacctcggggttggccagctgctcccactcgtccagcagactggagtccacctgacgcaccatctcgcccagccaggagatcaggtcctggaggtcctccgacttcacgtcgtccgggatcgtgtgctccagcgccttgtacgcgctcgccagataccgcagcacgatgccctcggtccgggccagctcgtagtgcgaagtgaactccgtgaacgtcatggcccgctcgtacatgtcccggatcaccgacttcggcgacaccggatggtcgttcacccacgggtggctcgtgcggtacacgtcgtacgcgtgccacagcagctcgctcagcggcttggggtacgtgacctcctggagccgctccatccgctcctcgtactcgaccccgtccgccttcatctgccccacggcctcgccgcgcgccttgttctgctgggcggccaggatctgccggggatcgtccagcgtcgactcgacgaccgagaccatgtccagcgcatacgacggcgattcggcgtccagcaggtcgaacgcggccagcgcgaacgtggacagcggctggttcagcgcgaagtcctgctggaggtcgaccgtcagccgcacgatccggccctcggcgtccggggtgtccaactgctccaccaccccgccgtccagcagcgagcggtagatggcgatggcccgccggatgtgccgcagctgcgcccggcgcggctcgtggttgtcctccagcagatgccgcatcgcctcgaaggcgttgcccgggcgggcgatgaccgcgagcagcatcgtgtgggtgacccggaaacgggaggtcagcggctccggctcggactggatcagcttgtcgaacgtcgactccgaccaggcgacgaagccctccggggccttcttgcggaccaccttgcgcttcttcttcgggtcgtcgcccgccttcttcagcgccttctcgttctcgatgacatgctcgggggcctgtgccacgacgaacccggccgtgtcgaacccggcccgcccggcccggcccgcgatctggtggaactcccgcgcgcgcagcgtccgcacccggttcccgtcgtacttggtgagcgccgtgaacagcaccgtacggatggggacgttgacgccgacgccgagcgtgtccgtcccgcagatcaccttcagcagccccgcctgggccagcttctccaccaggcggcggtacttcggcagcatccccgcgtggtgcaccccgatgccgtggcgtacgtaacgggagaggttctggccgaacttggtggtgaagcggaagctgccgatcagatcggcgatcttctccttctcctccttcgtgcacatgttgatgctcatcagcgactgcgcccgctccacggccgccgcctgcgtgaagtgcacgatgtagaccggcgactgccgggtgtccagcagctcggtgagcgtctcggtgatcggcgtgaagcggtactcgtagctcagcggcaccgggcgggtcgccgagcgcaccaccgaggtcgggcggccggtacggcgggtcaggtccttctcgaacatcgagacgtcgccgagcgtcgccgacatcagcacgaactgcgcctgcggcagctccagcagcggaatctgccaggcccagccccggtccggctcggcgtagaagtggaactcgtccatcacgacctggccgatgtcggcgtacttgccgtcgcgcagcgcgatggaggccagcacctcggccgtacagcagatcaccggggcgtccgcgttgaccgaggcgtcgccggtgagcatgccgacgttctcggtgccgaagagcttgcacaggtcgaagaacttctccgacaccagcgccttgatcggagccgtgtagaaggtgaccttgtcctgggccagcgccgtgaagtgcgcgcccgccgccaccaggctcttgcccgagccggtcggggtggacaggatcacgttcgccccggagaccacctcgatcagcgcctcctcctgagccgggtacatcgtgatgccctggctctcggtccatgaggagaaggcctcgaagagggcgtccgggtcggcggtctggggaagctggtcgatgagggtcacgcccccatcttgcctgtcttccgcccggatgagggaaccggcggacggcacgaagatcac

SEQ ID NO: 95 - protein, 263 aa, Streptomyces roseosporus
MMGPAHSLSGAAAWLGVGAAAAAAGHTMPWPVLVVGALICAGAALAPDLDHKSATISRAFGPVSKALCEIVDKLSYAVYKATKSAGDPRRTGGHRTLTHTWLWAVLIGGGCSVAAITGGRWAVLVILFVHLVLAVEGLLWRAARVSSDVLVWLLGATSAWILAGVLDKPGYGADWLFDAPGQEYMWLGLPIVLGALVHDIGDALTVSGCPILWPIPIGRKRWYPIGPPKAMRFRAGSWVEMKVLMPAFMVLGGVGGAAALNYI

SEQ ID NO: 96 - DNA, 792 bp, Streptomyces roseosporus
atgatgggaccggcacactctctgtcaggggcagcggcctggctgggggtgggcgcggcggccgccgccgcgggccacacgatgccctggcccgtcctcgtcgtcggggcgctgatctgcgcgggagccgcactcgcccccgacctcgaccacaagtccgcgaccatctcgcgcgccttcggcccggtctccaaagccctctgcgagatcgtcgacaagctctcctacgccgtctacaaggccaccaagagcgccggggacccccgcaggaccggcgggcaccgcaccctcacccacacctggctgtgggccgtcctcatcggcggcggctgctccgtggcggcgatcaccggcggccgctgggccgtcctcgtgatcctcttcgtccacctcgtgctcgccgtcgagggcctgctgtggcgggccgcccgcgtctccagcgacgttctggtgtggctgctcggcgcgaccagcgcgtggatcctggccggcgtcctggacaagcccggctacggggccgactggctcttcgacgcccccggccaggagtacatgtggctcggcctgcccatcgtgctcggcgccctcgtccacgacatcggcgacgccctcacggtctcgggctgcccgatcctgtggcccatcccgatcggccgcaagcgctggtacccgatcggcccgccgaaggccatgcgcttccgggccggcagctgggtggagatgaaggtgctgatgcccgccttcatggtcctcgggggagtgggcggggccgccgccctcaactacatatga

SEQ ID NO: 97 - protein, 255 aa, Streptomyces roseosporus
  MOD_RES (245): Variable amino acid
MLLAELAQVSLEVAATSARSKKVALLAGLFRDAGPEDVPVVIPYLAGRLPQGRIGVGWRSLGDPVEPAAEPTLTVTGVDARLTALAAVSGPGSQARRKEHLRALFAAATEDEQRFLRALLTGEVRQGALDALAADALARAADAPPADVRRAVMLAGSLQEVAGVLLADGPEALAAFRLTVGRPVQPMLAHTAASVGEALDKLGACAVEEKLDGIRVQVHRDGDRIRAYTRTLDDITDRLPELTAXVAALPAGRFI

SEQ ID NO: 98 - DNA, 1553 bp, Streptomyces roseosporus
atgctgctcgccgagctcgcccaggtgtccctggaggtcgccgccacctccgcccggtccaagaaggtggcgctcctcgccggactcttccgggacgccggacccgaggacgtccccgtcgtcatcccgtacctcgccggacggctgccccagggccggatcggcgtggggtggcgctccctcggcgacccggtggagcccgcggcggaacccaccctcaccgtcaccggcgtcgacgcccggctgaccgccctcgccgccgtctcgggccccggctcccaggcccggcgcaaggagcacctgcgcgccctcttcgccgccgccaccgaggacgaacagcgcttcctgcgggccctgctcaccggcgaggtacgccagggggccctggacgccctcgccgccgacgccctggcccgcgccgccgacgccccgcccgccgacgtccggcgcgccgtgatgctcgccggatcgctccaggaagtcgccggggtcctcctcgcggacgggcccgaggcgctcgccgccttccggctcaccgtcggacggcccgtccagccgatgctggcgcacaccgccgcctcggtcggcgaggccctcgacaaactgggcgcgtgcgcggtcgaggagaagctcgacggcattcgggtgcaggtccaccgcgacggcgaccggatccgcgcctacacccggaccctcgacgacatcaccgaccggctgcccgagctcaccgccgccgtcgccgccctcccggccggccgcttcatcctggacggcgaggtgatcgccctgggggaggacggcaggccccggcccttccaggagaccgcctcccgggtgggctcgcggcgggacgtggcggaggcggcggcgcacgtgcccgtcgccccggtcttcttcgacgcgctcctcgtcgacgacgaggacctgctcgacctgcccttcaccgaccgccacgccgccctggcccggctcctccccgagcacctgcgcgtccgccgcaccctcgttcccgacgcggaggacccgaaagcccgcgcggcggccgacgcgttcctcaccgacaccctggaacgcggccacgagggagtcgtcgtcaaggacctcgccgccgcctacagcgcgggccgccggggcgcgtcctggctgaaggtgaagcccgtgcacaccctggacctggtggtgctggccgtcgagtggggcagcggccggcgcaccggcaagctctccaacctgcacctgggcgcccgccgccccgacggtacgttcgcgatgctcggcaagaccttcaaggggctcacggacgccctgctcgactggcagacccagcgcctgggcgagctggccaccgacgacgacggccacgtcgtcaccgtacgcccggaactcgtcgtggagatcgcctacgacggactccagcgctccacccgctaccccgccggggtcaccctccgcttcgcccgcgtcctgcgctaccgcgacgacaagaccgcccaggaggcggacaccgtggagacggtcctgtcccggcggcggtgagcgcgcccccgtcctga

SEQ ID NO: 99 - protein, 475 aa, Streptomyces roseosporus
VNHPVNGAGERRTTQAREGTQTVAPPRILVVGAGFAGVECVRRLERRLAPGEAQITLVTPFSYQLYLPLLPQVASGVLTPQSVAVSLRRSRRHRTRIVPGGAIGVDTQAKVCVIRKITDEIVNEPYDYLVLAAGSVTRTFDIPGLLDNARGMKTLAEAAYVRDHVIAQLDLADASHDEAERASRLQFVVVGGGYAGTETAACLQRLTTNAVKHYPRLDPRLIKWHLIDIAPKLMPELGDKLGQAALEVLRKRNIEVSLGVSIAEAGPEEVTFTDGRVLPCRTLIWTAGVAASPLVATLGAETVRGRLAVTPQMRLPGADGVFSLGDAAAVPDLAKGDGAVCPPTAQHAMRQGRVLADNLIASLRHEPLKDYVHKDLGLVVDLGGTDAVSKPLGIELRGLPAQAVARGYHWSALRTNVAKTRVMTNWLLNAVAGDDFVRTGFQSRKPATLRDFEYTDVYLTPEQIKEHTAATVIKH

SEQ ID NO: 100 - DNA, 1428 bp, Streptomyces roseosporus
cagtgcttgatgaccgtcgccgccgtgtgctccttgatctgctcgggcgtcaggtagacgtccgtgtactcgaagtcccgcagcgtcgccggcttgcgggactggaacccggtccgtacgaagtcgtcaccggcgaccgcgttcagcagccagttcgtcatgacgcgggtcttcgccacgttcgtccgcagcgccgaccagtggtagccccgggccaccgcctgcgcgggcagcccgcgcagctcgatgcccagcggcttggacacggcgtccgtgccgccgaggtccacgacgagccccagatccttgtgcacgtagtccttgagcggctcgtggcgcagcgaggcgatcaggttgtccgccagcacccggccctgacgcatcgcgtgctgtgcggtgggcgggcagaccgccccgtcgcccttcgccagatcgggcacggcggccgcgtcgccgagcgagaacaccccgtccgcgcccggcagtctcatctgcggggtcacggcgagccggccgcgtaccgtctccgcgccgagcgtggcgaccagcggactcgcggccacgccggcggtccagatcagcgtccggcagggcagcacccggccgtcggtgaacgtgacctcctccggccccgcctcggcgatcgacaccccgagcgacacctcgatgttccgcttgcggagcacctccagcgcggcctgcccgagcttgtcgccgagctccggcatcagcttcggcgcgatgtcgatcagatgccatttgatcaggcgcgggtcaagacgcggatagtgcttcaccgcgttggtggtcagacgctggagacaggcggccgtctccgtgcccgcgtacccgccgccgaccaccacgaactggagccgggaggcccgctcggcctcgtcgtgactggcgtccgccaggtccagctgggcgatgacgtgatcccgtacgtacgcggcctcggccagcgtcttcatcccccgcgcgttgtccagcagcccggggatgtcgaaggtgcgggtgacgctgcccgccgccagcacgaggtagtcgtacggctcgttcacgatctcgtccgtgatcttccggatcacacagaccttcgcctgcgtgtccacgccgatcgccccgcccggcacgatcctggtccggtgacggcggctgcggcgcagcgacaccgccacggactgcggcgtgagcaccccggaggccacctgggggagcagcggcagatacagctggtaggagaacggtgtgacgagcgtgatctgggcctcgcccggagcgagcctgcgctccagacggcgtacgcactcgacgcctgcgaagccggcgccgacgacgagaatcctgggtggtgccacggtctgcgtcccttctcgggcttgcgtggttctgcgctcgcctgccccgtttaccgggtgattcacc

SEQ ID NO: 101 - protein, 343 aa, Streptomyces roseosporus
VTGRDLTWTDTTSTVDRGRFPDAVTPWEDPAWRAEALAWVTEGLAAHGLTETGPRAVRLRPWSVLVRLAVAGPAPVWFKAVPPAAAFEAGLTEALARWVPARVLAPLAVEAERGWILVPDGGPVLSEVLDGRPGAPDPGYWEEPLRQYAAMQRELTPYAEAIEALGVPAARPRDLPALFDRLVAGNAALPREDRVALEVLRPRVADWCEELASSGVADSLDHADLHEKQLFAPVSGRYAFFDWGDALVGHPFCSLLVPARAARERCGPEVLPRLRDAYLEPWTGGGVTAAGLRRAVSLAWRLAALGRAASWGRMFPVPPGGPGVAGDAEGAHWLRELAAAPPL

SEQ ID NO: 102 - DNA, 864 bp, Streptomyces roseosporus
cacaggggcggggcggccgccagctcccgcagccagtgggcaccctcggcgtccccggccacgcccggaccacccggcggtacggggaacatccgcccccacgaggcggcccggcccagcgccgccagccgccacgccaggctcaccgcacggcgcagcccggccgccgtgacgcccccgccggtccacggctccagataggcgtcccgcagccggggcagcacctcgggaccacagcgctcacgggccgcacgggcgggtaccagcaggctgcagaacggatggccgacgagggcgtccccccagtcgaagaaggcgtaccgcccggacacgggcgcgaacagctgcttctcgtgcagatcggcgtggtccagcgagtccgccacccccgacgacgccagctcctcgcaccagtcggccacccggggccgcagcacctccagcgccacccggtcctcccggggcagcgcggcgttccccgcgaccagccggtcgaacagcgcgggaaggtcgcgcggccgggccgccggaacccccagggcctcgatcgcctccgcgtacggggtcagctcccgctgcatcgcggcgtactggcgcagcggctcctcccagtagccggggtcaggggcgccgggacgcccgtcgaggacctccgacagcaccgggccgccgtccgggacgagtatccagccgcgttccgcctcgacggcgagcggggccagcacccgggccgggacccagcgcgccagcgcctcggtgagccccgcctcgaaggccgcggcgggcggaacggccttgaaccagacgggcgcgggcccggcgacggccagccgcaccagcaccgaccagggacgcagccgcacc

SEQ ID NO: 103 - DNA, 13013 bp, Streptomyces roseosporus
ggatccccgccgtcccggccgagcagcaggacgatccagcaccgggtgccgacactgcccacaccgacgaccttccgggccacgtccaccagcgcgaagtcctccagcagactgcgccgatcggatggcaggctgcgtgcgtaccccgccagcatggagccgaactgccggaacaccgcgtcccggtccacccccggcgtcagatcggtcagcgggacgaccatcggcggatccgccgcgatccgcagccgcccgtcgaccacctcggcgagcttcccgaacgcctgaaggctgtcccgggaccgggccttccccaacgcccggtcgacattcctgcgcccccgcccgcccaactgttccgtggccaccgtgcgcagccgctcggcatccgtccgcgcgtaccagacgtccagattgcgcatgcccgcgaaccgggccatcgcctcccggtacgagcggaccgtggcccggacgaccccggcccgctcccggagcgtgaagctgttcgcccgccccgcgatgacgaggctcgccgcgagccgcttgacgtcccactcccagggacccggcagcgtctcgtcgaagtcgttgatgtcgaacaggagattccgctcgggggaggccagcagccggaagttcagcagatgggcgtcaccgcacaactgcgccctgattcccgacaccggggtgccggccaggtcggcggccatcagcgcggccgctccccggtagaagcggaacggggactccgtcatccgggcatagcggatcgggaccagctcgggaacccggtccgccgactgggcttcgaggacggtcagcggatcggggcggcgcggcgacggggagaactccgcatggcccgaccggggcgcctcacggcgggccgccttgcccagtgccgcccgttcggccggtgtcgcgtgcggtgcggcgcgcagcggcgcctcggcttcccggtccatgacgtggctccttccggtcttcctcaggcctgttcggcgatccggcgctcacggtcgcggcggaggcggacccgctgccagatcgcccgctgggccttgagcgcgaacgcgcccaccacgatcagcacgaggatgttgacgacgagctgtatggccgagccccgtacgtcggaccagctggtgtacgccgtggagacggcgatgtccgcggcggccgggatcgtcgtcacggagatgaacaccccgagcagagcactggttctggcctcggtgagcgacacgatcccgacgattccggccagggtggcgacggcgacggagaagaagttcggcgtgttgatgagatgggagacgggccgcagcccccggtcgaacgcctccgactccagcccgaaaccccggatgaggagggcgaagaggaaggtgaccacgatggtcaggagaaggccgacgcccagggcggccagcccgctgcgcaccatggaccggtggcgccggtcgatccccagcgccacgctgacgatggcgccgtactccgggccgacgaccatcgccccgacgatcaggatctgcgagttggtgacgatgccgaccgacccgatcagaccggcgatgaccaggtagaggtagaagctcggcggataccggcccccggacctgatgcgggcctcgacctgttcccagaccggcgcccggctcagcggccccagctcgcgctgcccgccctcggtggccgcgccggagaaggccatgtcgacgggttcgatgacgagggagccccgccggtcgaggtgggcggcgcgcagccggtgcagtacgtcgttggccgcccccgtcagtacgtcgcaggcgatggcgtcgccgtcggggcggcgcgcggcgtcgcgctggacgatcagattgagcacgcacgggtcggccgagagcaggccgacgacctcgtcggtcaggtccggcgggctcaccgcgcggatgtggatcatgtccatcccggcacctccgcggctccctgccccgtcacacggagctgtgcccggcaggcggcccggggctcactccagtaacgcggcaccggcaacgttcggcaaaccggcggtcgcccgcacgggccggggcaccggggccgcgggcgggtgacccgcccgggctgggatcatgaaggggtggacacccccgacacacccgatgccttccccgaaccgctgcccggggccgacgaagcggtccgggaggagagggccaccgacgacgggacgccggagggccgccgcctcgtccgctgccgtctctgcggccggcccctgaccggggccgactcgcggcgggccggcctcggcccgtcctgcgacgccaagctgcacccggcgccgccggacatccgcacccgccgccacgaggtcgaccaggacccgctgccgggcacctgagccggaacggggctactgctccagccgccggaacagcccctcctgcaccaccgacaccagcagctgccccgaacggtcgtagatccgcccccgcgccaggccccgcccgcccgtggcgatcggcgactcctggtcgtacaggaaccactcgtccgcccggaacggccggtggaaccacatggcgtggtccagggacgcaaggtcatatccgcgcgggccccacagcggctccaccgggatacggaccgcgtccagcagcgtcatgtcgctcgcgtacgtcagcgcgcacgtgtgcaccagcgggtcgtcgcccagcgggcccaccgcccgcatccacaccgcgctgcgcggatcggcgtcctggatctcgtccttcgtccagcgcagccggtcgacgtaacggatgtcgaagggctggcggcgggccatccgctccagcgcctccggcagcgcgcccagatgctcgcgcacctcctcggcgaccgtcggcagctcctccgggtccgggacgatccgggcgggcggcagctggtgttcgaagcccgcctcctcggggcggtggaaggacgccgtcaggttgaagatcgtccggccctcctggaccgccgtcacccgacgggtggtgaaggaccggccgtcccgcacccgctccacctggtagacgatcggcacaccgggacgccccggccgcaggaaataggcgtgcagcgagtgcaccggccgctccccgtcggtggtccggcccgccgccaccagcgcctggcccgcgacctgcccgccgaagacccgttgcagggactcctccgggctgcgcccccggaagatgttgacctcgatccgctccaggtcgagcaggtcgaccagacgctcggccggattcgtcatgccgcacctctcccgtcacacgtcagggtccgcttcacagctggccgacctcggtgacccggacgaccgcccggccctcctcgtcggacgccgcgaggtccacctcggccttgatgccccagtcgtgatcgcccgccggatcggcgaacgcctgccagacccgccacagcccgtgcgccgggtcctcctcgatcttcagcagcttcgggccccgcgcgtccggaccggtcccgatctcctcgtgcgcgtcccagtacgcgtccagcgcctcgccccacgcgtcctcgtcccacccggactcgccgtccagctcgcccagcgcgccggcccggtccagcgcggccagctccacccggcggaacatcgcgttgcgcaccagcacccggaaggcgcgcgcgttcgccgtgaccggcttgacctcgtccgccttctcctgagcctgctccgcggtctccacctcggggttggccagctgctcccactcgtccagcagactggagtccacctgacgcaccatctcgcccagccaggagatcaggtcctggaggtcctccgacttcacgtcgtccgggatcgtgtgctccagcgccttgtacgcgctcgccagataccgcagcacgatgccctcggtccgggccagctcgtagtgcgaagtgaactccgtgaacgtcatggcccgctcgtacatgtcccggatcaccgacttcggcgacaccggatggtcgttcacccacgggtggctcgtgcggtacacgtcgtacgcgtgccacagcagctcgctcagcggcttggggtacgtgacctcctggagccgctccatccgctcctcgtactcgaccccgtccgccttcatctgccccacggcctcgccgcgcgccttgttctgctgggcggccaggatctgccggggatcgtccagcgtcgactcgacgaccgagaccatgtccagcgcatacgacggcgattcggcgtccagcaggtcgaacgcggccagcgcgaacgtggacagcggctggttcagcgcgaagtcctgctggaggtcgaccgtcagccgcacgatccggccctcggcgtccggggtgtccaactgctccaccaccccgccgtccagcagcgagcggtagatggcgatggcccgccggatgtgccgcagctgcgcccggcgcggctcgtggttgtcctccagcagatgccgcatcgcctcgaaggcgttgcccgggcgggcgatgaccgcgagcagcatcgtgtgggtgacccggaaacgggaggtcagcggctccggctcggactggatcagcttgtcgaacgtcgactccgaccaggcgacgaagccctccggggccttcttgcggaccaccttgcgcttcttcttcgggtcgtcgcccgccttcttcagcgccttctcgttctcgatgacatgctcgggggcctgtgccacgacgaacccggccgtgtcgaacccggcccgcccggcccggcccgcgatctggtggaactcccgcgcgcgcagcgtccgcacccggttcccgtcgtacttggtgagcgccgtgaacagcaccgtacggatggggacgttgacgccgacgccgagcgtgtccgtcccgcagatcaccttcagcagccccgcctgggccagcttctccaccaggcggcggtacttcggcagcatccccgcgtggtgcaccccgatgccgtggcgtacgtaacgggagaggttctggccgaacttggtggtgaagcggaagctgccgatcagatcggcgatcttctccttctcctccttcgtgcacatgttgatgctcatcagcgactgcgcccgctccacggccgccgcctgcgtgaagtgcacgatgtagaccggcgactgccgggtgtccagcagctcggtgagcgtctcggtgatcggcgtgaagcggtactcgtagctcagcggcaccgggcgggtcgccgagcgcaccaccgaggtcgggcggccggtacggcgggtcaggtccttctcgaacatcgagacgtcgccgagcgtcgccgacatcagcacgaactgcgcctgcggcagctccagcagcggaatctgccaggcccagccccggtccggctcggcgtagaagtggaactcgtccatcacgacctggccgatgtcggcgtacttgccgtcgcgcagcgcgatggaggccagcacctcggccgtacagcagatcaccggggcgtccgcgttgaccgaggcgtcgccggtgagcatgccgacgttctcggtgccgaagagcttgcacaggtcgaagaacttctccgacaccagcgccttgatcggagccgtgtagaaggtgaccttgtcctgggccagcgccgtgaagtgcgcgcccgccgccaccaggctcttgcccgagccggtcggggtggacaggatcacgttcgccccggagaccacctcgatcagcgcctcctcctgagccgggtacatcgtgatgccctggctctcggtccatgaggagaaggcctcgaagagggcgtccgggtcggcggtctggggaagctggtcgatgagggtcacgcccccatcttgcctgtcttccgcccggatgagggaaccggcggacggcacgaagatcacggacggtacgctgcggactcaacctgcccgcgccgcaccggtgatgggcgcacgaaccactgggggcgggacagaccatgatgggaccggcacactctctgtcaggggcagcggcctggctgggggtgggcgcggcggccgccgccgcgggccacacgatgccctggcccgtcctcgtcgtcggggcgctgatctgcgcgggagccgcactcgcccccgacctcgaccacaagtccgcgaccatctcgcgcgccttcggcccggtctccaaagccctctgcgagatcgtcgacaagctctcctacgccgtctacaaggccaccaagagcgccggggacccccgcaggaccggcgggcaccgcaccctcacccacacctggctgtgggccgtcctcatcggcggcggctgctccgtggcggcgatcaccggcggccgctgggccgtcctcgtgatcctcttcgtccacctcgtgctcgccgtcgagggcctgctgtggcgggccgcccgcgtctccagcgacgttctggtgtggctgctcggcgcgaccagcgcgtggatcctggccggcgtcctggacaagcccggctacggggccgactggctcttcgacgcccccggccaggagtacatgtggctcggcctgcccatcgtgctcggcgccctcgtccacgacatcggcgacgccctcacggtctcgggctgcccgatcctgtggcccatcccgatcggccgcaagcgctggtacccgatcggcccgccgaaggccatgcgcttccgggccggcagctgggtggagatgaaggtgctgatgcccgccttcatggtcctcgggggagtgggcggggccgccgccctcaactacatatgacgcaccgccggtcgcgcccggtgcgtctccggcgggcggcgcgtccggtgtccttccggcgggcggcgcgctccgccccgtagcaccatgggcgcatgctgctcgccgagctcgcccaggtgtccctggaggtcgccgccacctccgcccggtccaagaaggtggcgctcctcgccggactcttccgggacgccggacccgaggacgtccccgtcgtcatcccgtacctcgccggacggctgccccagggccggatcggcgtggggtggcgctccctcggcgacccggtggagcccgcggcggaacccaccctcaccgtcaccggcgtcgacgcccggctgaccgccctcgccgccgtctcgggccccggctcccaggcccggcgcaaggagcacctgcgcgccctcttcgccgccgccaccgaggacgaacagcgcttcctgcgggccctgctcaccggcgaggtacgccagggggccctggacgccctcgccgccgacgccctggcccgcgccgccgacgccccgcccgccgacgtccggcgcgccgtgatgctcgccggatcgctccaggaagtcgccggggtcctcctcgcggacgggcccgaggcgctcgccgccttccggctcaccgtcggacggcccgtccagccgatgctggcgcacaccgccgcctcggtcggcgaggccctcgacaaactgggcgcgtgcgcggtcgaggagaagctcgacggcattcgggtgcaggtccaccgcgacggcgaccggatccgcgcctacacccggaccctcgacgacatcaccgaccggctgcccgagctcaccgccgccgtcgccgccctcccggccggccgcttcatcctggacggcgaggtgatcgccctgggggaggacggcaggccccggcccttccaggagaccgcctcccgggtgggctcgcggcgggacgtggcggaggcggcggcgcacgtgcccgtcgccccggtcttcttcgacgcgctcctcgtcgacgacgaggacctgctcgacctgcccttcaccgaccgccacgccgccctggcccggctcctccccgagcacctgcgcgtccgccgcaccctcgttcccgacgcggaggacccgaaagcccgcgcggcggccgacgcgttcctcaccgacaccctggaacgcggccacgagggagtcgtcgtcaaggacctcgccgccgcctacagcgcgggccgccggggcgcgtcctggctgaaggtgaagcccgtgcacaccctggacctggtggtgctggccgtcgagtggggcagcggccggcgcaccggcaagctctccaacctgcacctgggcgcccgccgccccgacggtacgttcgcgatgctcggcaagaccttcaaggggctcacggacgccctgctcgactggcagacccagcgcctgggcgagctggccaccgacgacgacggccacgtcgtcaccgtacgcccggaactcgtcgtggagatcgcctacgacggactccagcgctccacccgctaccccgccggggtcaccctccgcttcgcccgcgtcctgcgctaccgcgacgacaagaccgcccaggaggcggacaccgtggagacggtcctgtcccggcggcggtgagcgcgcccccgtcctgaaggggcgcgctcgtacagggcccggcggctcagtgcttgatgaccgtcgccgccgtgtgctccttgatctgctcgggcgtcaggtagacgtccgtgtactcgaagtcccgcagcgtcgccggcttgcgggactggaacccggtccgtacgaagtcgtcaccggcgaccgcgttcagcagccagttcgtcatgacgcgggtcttcgccacgttcgtccgcagcgccgaccagtggtagccccgggccaccgcctgcgcgggcagcccgcgcagctcgatgcccagcggcttggacacggcgtccgtgccgccgaggtccacgacgagccccagatccttgtgcacgtagtccttgagcggctcgtggcgcagcgaggcgatcaggttgtccgccagcacccggccctgacgcatcgcgtgctgtgcggtgggcgggcagaccgccccgtcgcccttcgccagatcgggcacggcggccgcgtcgccgagcgagaacaccccgtccgcgcccggcagtctcatctgcggggtcacggcgagccggccgcgtaccgtctccgcgccgagcgtggcgaccagcggactcgcggccacgccggcggtccagatcagcgtccggcagggcagcacccggccgtcggtgaacgtgacctcctccggccccgcctcggcgatcgacaccccgagcgacacctcgatgttccgcttgcggagcacctccagcgcggcctgcccgagcttgtcgccgagctccggcatcagcttcggcgcgatgtcgatcagatgccatttgatcaggcgcgggtcaagacgcggatagtgcttcaccgcgttggtggtcagacgctggagacaggcggccgtctccgtgcccgcgtacccgccgccgaccaccacgaactggagccgggaggcccgctcggcctcgtcgtgactggcgtccgccaggtccagctgggcgatgacgtgatcccgtacgtacgcggcctcggccagcgtcttcatcccccgcgcgttgtccagcagcccggggatgtcgaaggtgcgggtgacgctgcccgccgccagcacgaggtagtcgtacggctcgttcacgatctcgtccgtgatcttccggatcacacagaccttcgcctgcgtgtccacgccgatcgccccgcccggcacgatcctggtccggtgacggcggctgcggcgcagcgacaccgccacggactgcggcgtgagcaccccggaggccacctgggggagcagcggcagatacagctggtaggagaacggtgtgacgagcgtgatctgggcctcgcccggagcgagcctgcgctccagacggcgtacgcactcgacgcctgcgaagccggcgccgacgacgagaatcctgggtggtgccacggtctgcgtcccttctcgggcttgcgtggttctgcgctcgcctgccccgtttaccgggtgattcacccctcatcctcaccggaggctccggcatccgcctcctggcaggggtgaaacggggcccggtcacaggggcggggcggccgccagctcccgcagccagtgggcaccctcggcgtccccggccacgcccggaccacccggcggtacggggaacatccgcccccacgaggcggcccggcccagcgccgccagccgccacgccaggctcaccgcacggcgcagcccggccgccgtgacgcccccgccggtccacggctccagataggcgtcccgcagccggggcagcacctcgggaccacagcgctcacgggccgcacgggcgggtaccagcaggctgcagaacggatggccgacgagggcgtccccccagtcgaagaaggcgtaccgcccggacacgggcgcgaacagctgcttctcgtgcagatcggcgtggtccagcgagtccgccacccccgacgacgccagctcctcgcaccagtcggccacccggggccgcagcacctccagcgccacccggtcctcccggggcagcgcggcgttccccgcgaccagccggtcgaacagcgcgggaaggtcgcgcggccgggccgccggaacccccagggcctcgatcgcctccgcgtacggggtcagctcccgctgcatcgcggcgtactggcgcagcggctcctcccagtagccggggtcaggggcgccgggacgcccgtcgaggacctccgacagcaccgggccgccgtccgggacgagtatccagccgcgttccgcctcgacggcgagcggggccagcacccgggccgggacccagcgcgccagcgcctcggtgagccccgcctcgaaggccgcggcgggcggaacggccttgaaccagacgggcgcgggcccggcgacggccagccgcaccagcaccgaccagggacgcagccgcaccgcccgggggcccgtctccgtcagcccgtgagcggcgaggccctcggtcacccaggcgagggcctccgcccgccaggccgggtcctcccagggcgtcacggcgtccgggaagcgcccccggtccacggtcgaggtcgtgtcggtccaggtcaggtctcttccggtcacggcggtcgtggtcgtgccggggccggtcacggcggtcgtggtcacggcatccggggccgcgtcgggcatgggcatctcgtctccgcgcatccgatcatgggatcaccggccccggcgcgtgcgcaccgcaatttccgggaacacccgttcccgtcctgcccggatcggctgtcctcccccctccggcccctggaacggcgggagttcggccgcccgccccgtgcgaggatgctgtggtgaccacctcgccctcctcgcccgtggccgacgactcttccgtgtcttccgtggacgacgccccgccccgcgaccaggggctgagctcccgggccgcggcggtcctcgtcttcgggtcctccgccgcggtcctcgtggtcgagatcgtcgccctgcggctgctcgccccgtacctcggcctcaccctggagaccagcacgctggtgatcggcatcgcgctgaccgccatcgccctgggttcctggctgggcgggcgcatcgcggaccaggtcgatccgcaccggctcatcgcccccgcgctcggggtgtcgggcgtgggcgtcgcgctcaccccgctcctgctccgtaccaccgcggagtggtctcccgcgctgctcctgctggtcgcttcggcgaccctcctggtgccgggcgcgctgctctccgcggtgaccccgttcgtgacgaagttgcggctcaccagcctcgccgagaccgggacggtcgtcgggcggctgtcgggcgtcggcaccttcggagccatcgtcggcacggtgctcaccggattcgtcctggtcacgcggctgcccgtcagctccatcctgatcggcctcggcacgctgctggtgctcggggcggccctcgtcggatggcaggcccggcggtggcggcgcgccacggccgtggccctcgccaccgtcgtcgcgggcactctcgccaccgggttcgctcccggcggctgcgacgcggagacccgctaccactgcgcccgggtcgtcgcggaccccgaccgggacagcggccgcaccctcgtcctggacggcctgcgccactcctacgtcgatgtcgaggaccccgagtacctgaagttcgcgtacgtacgcgccttcgcctccgtggtcgacacggccttccccgagggcgagccgctgaccgcccaccacatcgggggcggcggcctcaccttcccccgctacctcgcggccacccgccccggaacccgcagcctcgtctccgagatcgaccccggggtcgtccgcatcgaccgcgaccggctcggcctcggcacccctgccgcgaccggcatcgacgtacgcgtcgaggacgggcgtctcggcctgcggcggctggacgcgggcagccacgacctggtcgtcggcgacgccttcggaggcgtcagcgcgccctggcacctcacgacgtcccaggcactcaaggacgtacgccgggcgctcgacgcggacggcctgtacgtcaccaacctcatcgaccacggccggctcgccttcgcccgcgccgaggtcgccaccctcgccgcgaccttcccgcatgtcgcgctgctcgggcagcccgcggacatcggcctggaccccacggcttcgagcatcggcggcaacatggtggtcgtcgcctccgcccggccgctcgacgcccccgccatccaggaagccatggacgcccgggacgtcggctggaggatcgccaccggcgacaccctcaccacctggacggggaacgcccgggtgctcaccgacgaccacgcgcccgtcgaccaactcctccagccccaccccgtcccagcggcccggtgaggcccgaacgggcccgatgatcccgcccgaacgccccggtgacgcacgaacggcccggtgatccccggccgttcgcgcggggatcaccgggccgttcggccaagacgcctcacccgtgccaggaccgccacagcgacgcgtacgcgccgcccgccgccaccagctcgtcatggctgcccagttcactgatccggccgtcctccacgaccgcgatcacatccgcgtcgtgcgcggtgtgcagccggtgcgcgatc

SEQ ID NO: 104 - protein, 217 aa, Streptomyces roseosporus
MAQPIELVIFDCDGVLVDSERIAVRVDALVLAELGWNLTEAEIVDRFMGLSSRSMTRQIEDHLGRRLPADWEEEFKPLYDEALAAELTPVEGIVDALDALTHLPTCVASSGSHDKMRFTLGMTGLRPRFEGRIFSATEVEHGKPAPDLFLHAARKMGVVPEACAVVEDSQYGLQAARAAGMRAFAYAGGLTPADRLEGPGTVVFDDMRRLPGLLADH

SEQ ID NO: 105 - DNA, 654 bp, Streptomyces roseosporus
atggcccaacccattgaactcgtcatattcgactgcgacggcgtactcgtcgacagcgaacgcatcgcggtgcgcgtggacgcactcgtcctggccgagctggggtggaatctcaccgaagccgagatcgtcgaccggttcatgggcctgtcgagccggtcgatgacgcggcagatcgaggaccacctcgggcgccgtctgccggccgactgggaggaagagttcaagcccctctacgacgaggcgctcgccgccgaactcacgccggtcgagggcatcgtcgacgccctcgacgcgctcacgcatctccccacctgtgtggcatccagcgggagccacgacaagatgcgtttcacgctggggatgaccggtctccgcccgcgcttcgaaggccgcattttcagtgccaccgaggtcgagcacggcaagccggccccggatctgttcctacacgccgcgcggaagatgggggtcgtgcccgaggcgtgcgccgtggtcgaggacagtcagtacggtcttcaggcagcccgggccgcgggcatgcgagccttcgcctacgccgggggactgactcccgcggaccgtctcgaaggccccggcaccgtcgtcttcgacgacatgcgcagactgcccggcctcctcgcggatcactga

SEQ ID NO: 106 - DNA, 23949 bp, Streptomyces roseosporus
  modified_base (50): a, t, c, g, unknown or other
cgccgtagagccacgcaggagaggcggtcggcccatcggggtcgaccgcntctcccgtttccctcaggtcaggtcagcacgcgcccgccgggcggtcccgcttcacgacgttcgtgtaaccggtcgtgccgtccagccagacgacgcgcttgccctcgtcggccgaggcgtagacctggtcgccgcggttgcaggacacgcgctgggcgccgcccttgccgtcgggtgccacctggaacagcttcggcagggtctcgttggcccatgaggtggccggcggcagcgaggtgacgttgaccgcgtcgtcggaggccgtcagctggtaggcgtgcagggagccttggccggtttcggggacgaccgtggtgcggttcgtgccgtcggcgtcggcgcgcacgacggcggccttggcggggtcggtgccggcgccgtcctcgatccagaagacaccgtcgtcggtgaaggccgtctggccgatgccctgcgcgccctcggctccggccggcatcatccgggtggtgccggtggcggtgtccaggaccccgatgcccagttggacgtcgctgccgtcgatccacatcgtggcgtaggcgatcttcccgtcccggatcgagggcatggccgtgacctcgatgcccttggcgaggatcatgcccgcctcccgggtcctgatgttgatgtagccgatctgctgccggccggtctgcgggttcgtcaccgtgtaggcgaggaagtcgccttcgaggacgagctgcgagacattggctccgacgccgccgacgaccctggccgggccgccgcccaccggacggacatggaagaggaccgaccccggggagaactcggcccaggcgacgttcttgccgtccgtcgtcgcgtagacgttgtagttgccgttgttgccgctcaccagctgcggcttgcccttgccgtcggtgttgccgagccacaccgagtacggttcgctgccttcctcgtcggagcgggagacggcgtacttgccaccgccggcgccgacgccggtgcccgccacgttgaccttggacacgagggtgtccgtgtcgacaccgagcgccttctcccagccggggacgatgccgtgcgcgtcgaacgaacgcttcacgatcttcgtctgcgccttggtggcgcccagctcctgcgctgcggcgatgaccgccgcgcggccctcggtgaagccgtcgagcggcgtcatgtacgcggacagcgcgcggtagacgatctggtcggccggctcggcgccgaggtcctcgcgcatgtcccacagggcgcccgagaagatcgtggagttgaggtgtacgccaccgttgtcgccgttgtggctgacgccgatgaagtccttcgacgtggtggcaccgtcgttgaggtcccgcagcgcgcagtcgcgcgggccgagcgtggtgcacaggtcctcgccgagcagaccggcgtccgggtcgtccatcgaccggccgtcggcctccaggtcgatggcgttgccgaagtagtcggctatcgcctcgttcacggcgccggactggcccgcgtacaccaggttcgcggtgtgctcgatgacaccgtgcgtcatctcgtggccgaccacgtcggtgtccgccgagaaggtgcggtagtcgccgccgccctggccgtacaccatcttggtgccgtcccagaaggcgttgttgaacggcttcccgccgttcaccacacccacgagcgagtacatgaacccgtccttgccgtccaggctcttacggccgaagtggttcttgtagtagtcgtagaccttcccggccgcccagtgggcgtccaccgccccggagtcggtgaactccttgcccaggtcgggggtgtccgagcggaacgtctggatgccgctgggccacgtgccggacgccgtggcggcctcccggccacgcgcgtcccaggtcgacagcagcggaccgtcgtacgggctgtcggcgccccgcttgctgtagtcgtacatctggtaggcgccgtcggcgccctggtacaggttgatctcggcctcctcgccgttgtagcgggtgcccgagcccttgacgaccagctgctgcgtggcctccgcggtggcgtcggccgtgggcgcgtcgccggtggcgccgctgctcgtaccggcgcccgaacccggtgcgccgaacgacttgatgccgctgtactgcatcacggggaagccggagtgggcgtcgatgtacacctcctgcttcaccggcgtgccgtcggccgggctgacgccggtgacggtgatgtgccgggtcagcacaccggatccctggggcaggacggtcacgtcaccggccgtacccgacagctgaaccccgccgggcttctcgcccttggccggggccctgagcaggcccccgcccagctgcgcggagacggcgccgaccgcgcgctcgatcgcggtcttctcggagacctccggcgtcaccgtgtcgagcttcagctcggtgaagtagctgccggacgtgccggtgacggtgcgcttgccgtccttcttcgtcatccggaccaggtactggccgccgaggaccgtgacgccgcggtacttctgctggagacggaccgtctccctgccgcccctcccggtcgtggtcccggccgcggccaggtccttcgccgaggtgtgcgcgatgcggtagcggctcttcttcgccttgaggtggccacgggcggcgtccgccgcggtgccggtggcgtcggcctcctcgttgagtcccgtgacgagcgagggggtcccggtcccggcacccggcgtcacctcggacgcggcggacgtggtggcggtgtccgcgtgagcggcgggcgtggccgtcatcaacaggcccgcggcggccagtaccgccaccacgccctggccgacgaacgtggtgccggacccctgacctggtccggccgatctgctgcgcgatgaactccgcacagttgcccctcccgaatgcgattgctgcatgaacggatctcggatgccgacatggaagtaccggggcgggggtgggaacaatgcgttccgcgcgtgcacttgtggacgtacacacttgtgtggcctgcattgacaggtgacaattccgccggtggggcggactgggtgggacacgcaatggcaggcgctcgggctcggagcggacgaactccgggtgtacgaagcgctcctcgacgcacccgtacccgcctcccgtaccgccctcgcccagcacctggggctgaccgtgcgccgggtcacgaacgccctggatcacctggccgagcgccgcttcacccacccggcccggggcgccgggctgcccgtggccatggcccccgccaccgccctgcgcaatctgatccatctgcaccaggcggaactcctgcaccgatcggcggagttggaggagctcagcggatccgtcgaccggatcgcggcccaactgctgagctccgtgcacaccccccgcgccaccggcatcgagacggtccgcggcggagcggcgatcgccgcccgggtggcctccctgctggtgtcggcgagcgaggagatcgccctcctggaccggccgccgtacgcgtcgagcgagccggacgggatgcccgtccccctcgacatggccgaaccggtacgtcggggggtacgcgtccgggtcgtggtggaccgcgaggggctgagcttccacgggcgcgcccgcggcctgggcgatctggccgtgcagggggtgcagatccgggtgggcacggatctgccgacgaagctgatcacggtcgaccggcgggtgaccctcctgccgccgacggacgcggcggacccgacggcctccgcactggtggtgagcgacgcgctgctgagcaacgcgctggtgccgctgttcgagtcggtctgggaacgggcgctccccatcggctccgtgacgcatgatcagatcacggacggcgaccgggagttgctgacgatgctcgcctccggcctgaaggacgaggcgatggcccggcgcctcgacatccatgtgcacacggtccggcgccgcatcacccgtctgatgcaggtcctcaacgcggagacccgtttccaggccggggtacaggccgcgctccggggctggctcaccgggtgagccagccccggccccctcagcccgccttcaccgtcccgccgagacgggcgcggtgccgccgcaggacgcacggatgatcaggttgggccacaactcgactcggtgcaccgggcgttcgacgggatcgacggcgcgtgccagggccatttcggcggccaggacgccgagccggtgcttctgcgggcgcacggcggtcaggggagggtcggcggcggctgccacctcgtcgtcgtaggtgatgacggcgaggtcctcggggaccgcgagtccgtgttcgtgggcgcgctccaccaggccgacggcctcaccgtcggagtggacgaacagggcggtggcgccggcctcgcggcagctgcggagggccgcgtcgtaggcgtccgcccagccgggggagccgtacgacggtacgtcgtgtgcgaggccgtcgccggagggcaggccgagagaggcggtggtctcctgccacccctcgcgcagggccttggtggtggggctgaagcgcgcggtgacgaaggcgatacggtgatggcccagggtgaccagatgccgtacggccaggcccgcgccgaggctgtgggcggtggtgacggcgtcgagcggcagggtgggcagagcgggcggcggcagccgttcgacgaggatgacggggacgttcagcgagcccagccagcgcagcaggtcctggccggcctcgccggtgttggtgggggcgacgagcagcgtgcgcacaccgcggtcgaggaggccggtgacctggcggcggtcctccgccgcgtcgtaggcggaagcgcgcaggaccagccgtcccccggcggcggccaccgccgactgggcgccctggatgaccgccggccagtagtactcgacggtggggacgaccatgccgacgaacgcctggtcgggcaggcggccgtgggtgaacacgccccgggtggcccgctcgtcggccgtcggcccgcgataggggagggtgacgcctccgtggacgcgcgacaccagcccccggtcggccaggatcgtgacgtcccggcggaccgtcacggcggtgacgcccagccgctcgaccagatcggccaggcgcacggtgccgcgttcccgcacggtggcgaggatgaactcctgccgttccgatgcgagtgccatcccggcctctccttttccttctgatcgaactgtgtcgttcgacttctcttcgacttctcgtggatgtcgtctgttctatcgcaggcgcccccgatccaggaaggcgctacccgctttgccgggaatgcgagctagcgggagggctctcggatcgggagcggggcctctccggagctcgttgagctttgctttcctatcgatcctgatcgattcatttcgctaccgttgaccgaaaatcggccaggggctgaagtgtgcgaacaccttcctgcacgaaaggaaacccctggtgctcggcttctcctccgacgccggtgacagcgcacacgcccctcggacgcaccgatcgcggaggtccctgctgcggacctccgcgggcctgggggcagcgcttctcgccggcggcacactcaccggctgttcgggccggacctccggaaccgtccgggtccgtatgtggtcgtggctgaccggcatggaccggtacgtcgccgcgttcaactcctcccagcgcgacgtccgggtcgacctgagcgtgatcgccgccggtacgtccgggggctacgcccagcagaccaacgcgatccgcgcccacaacgccccggacatcctgcacgtcgagtaccaggccctgccgcagatcgcgaccaccggcgggctgcgcgatctgagcgcggacgtggacgatctcgccgacggcttcctgcccgccgcgtggcagagcgtccgccccggcgggaagacctgggcggtgcccatggacttctgcccgatggcgttcttctaccgcaaggacctgttcgaccgggccggcatcggagtgccccgtacctgggaggagttccgccgggccgcctcggccgtccgcacggccgaccgggatgcgcggatcaccaccttcccgctcaacgacggcgccttcttcgccgggatggcctgccaggccggcgacccctggtgggacatcgccgggaacgcgtggcgggtcgggatcgacggcgcgggcacgatgcgcgtggccgagtactggcaggacatggtgtcctccggtcttgccgcgcgcgacgccaccggcacccagagctggatctccgcgatgcaccacggccggctctgggggatgctcggggccacctggggcgtgggcatgctgaagaagtccctgcccgcccaccarggccgctgggcggtcgcacccctgcccacctggggcgacgacccgtccaccggggtctggggagggtcggcgttcggggtctccgccgagagcgaggtgcccgaggccgccctgacgttcctgcgctggctcagcaccgaccccgcggttccccggatcggctcggmgttcaccttcccctcgcccgctttcctcgccaaccggaaggtggcccgtaccgcctacgaggacgggtacttcaccggcgaccccgtcttcgacgtgctggacgagtccgcgacccgggtccccgggtggacgtggggcccgacctcgctgagcaccttcgccacgatcgccgaggcgctcggcccggtctccaccggagccaccaccatcccccgggcgctgcaccgggttcacacctcgaccgtcgccgcgatgcgggcccgcggcctggccgtcaccgaagggagccggacatgacagccgtccccacaccggcgacgacgccccctggcccggcctccgcgcggtcacgccgggcagcccgccggcgccgcttcaccggggccgcactggcggcaccgttcgcactgctgctgctctgtaccgtgctgatcccgatcgggtacgccttctacctcagcctcttcgccgaccgcctctccgggctcggcttcgacgggtaccgccaggtcctcaccggcttcgacaactacaccgacgtcctcgccgacccggccgcccgcgacagcgtggccaacgtcgcccgctacgccgcgatccacatccccgtcatgttcggcggcgccctgctcatcgcgctgctgctcaactccgccaccgtacggctgcgccaactctggtccctggcggtcttcctgccgtacgcggtgcccggtgtgatcgccggtctgatctggggctacctctacagccccggcatcggcccgctcgccgacgtcctgccgttcgacccgttcggcgagtccggagtgctgccctcgatcgtcaacatggccacctggcagtggacgggctacaacgtgatcatcttctacacggccctgcagaccgtgccccgcgacgtgctggaggccgcgcgggccgacggagccggcgccctgcgcaccgcgctgtccatcaagatccccatgatccgcccgacgatcttcgtcgccctcgtcttcaccaccatcggctccctccagctgttcaccgaacccatggtcctgcgcaccttcaccggcgcggtcaccagcacctggacccccagcctctacatctacgacgcggccttcatcaggaacgactacgggcgcgccgccgccgcgtccattctgctcgccctcgcctcggccctgctctcggcgctggtgatgcggctgtcctcccggaggtcacgatgagtgcgaccgtcaccacctcaccgcccctggcgacgcgcggaacatccggccgccgccgcgccgcccccgacctaccgccgtacggtccccgcggctcccgctggacctcacgcgccgcggtccacggcgtgctcctgctcgccgccctctacagcgtcctcccgctggtgtggctggtcacctcggccaccaaatccgtcggcgacttctccgccaccagcgccttcgaactcgccgacttcaacctctggggcaatctgcgcgacctgttcgcccgggaggacggcgtcttcctccactggatacgcaactcgctgctgtacgcgggcgtcggagccgttctgggcgcgctgatctgcaccgcctgcggatacgccgtcgccaaactcgacttccccggacggcgcgccctgttcgccgtgaccctggccggggtcctcgtaccgcccaccgcgctcgctctgcccctgtacctgctcgcctcgaacctgcacctcgtgaacaccttctgggcggtgttcctcccgctgctcagcaaccccttcggcgtctacctcgcacgcaccttcgcggacgcagccgtccccgacgaggtcctggaggcggcacgactcgacggggcgggtgagttccgcatcttcctgaccgtcgccctgccgatgatgatgcccggcttcgtcaccatcgtgctgttccagttcgtcagcatctggaacaacttcttcctgccgctggtgatgctcaccgaccccgaactgttccccatgaccctcggcatctaccagtggaacacccgggccccgcagttccccgactacaaccccctggtcatcacgggatcgctgctcgccgtcgtaccgctgatcatcgccttcgtcgtcctgcagcgccagtggcgcagcggcctggccgcagggagcgtcaagtgaccgccaccgcgaccccgtccaccggatccggggcggccacggctccccgcaggcccgagaccctgctgctgatgaacgaccggacccggcacacccagttcgggcccgaggagttggaccggctgcacgccgtcgcctcgctcggacagccgctcggcgccgcggacctggactccggcgccgtccgcgcccgcctcgccgaggtggaggtgctgatcacctcctggggctgccccaccctcgaccaccgcgtcctgcgagccgccccgcgcctgcgtgccgtgctgcacgcggcgggatcggtacggggccatgtccccgacgccgtgttcgaccggggtctgctcgtcaccacggccgccgacagcaacgccgaacccgtcgcccagtacacgctcggcgcgatcctctgggcgttcaagaaggtgccgttcctcgccatggacgcccggcgctcccgcgaggactggagctacctgcaccgcaggggagagctcagcggccgtgaccgcaccgtcgtcctcgtcggcttctcccgcatcggccgccgcgtcgtcgacctcctgcgcaccctggacctggcccgggtcctggtcgtcgacccggtggcggaccccgccgaggtcgtggccgcgggagcccggccggcccagctcgcggaggcgctcccgcaggccgacgtactcagcctgcacgcaccggcactgcccgggacccggcacatgatcggagcggcacagctggccgtgctgccccccggcgccgtcctcgtcaacaccgcccgcggctccctcgtcgacaccgcggccctggaggcggcctgccgcgccggactgcacgccgtcctggacgtcaccgaccccgaacccctgcccgccgacagcccgttgtacgacctccacaacgtcgtcctcactccgcacatcgccgggtccctcggctccgagacccgcacgatggccggcgccgccctcaccgaactggagcgctacgccgccgggctgcccccactggccccggtcacccggcagtccctgaccacgcaggcctgacctgctccggctccgaccggaccctccacccaccccagaggagcgtcatgaaccatcagcatcccggccgaaggaccgtactgcgggcgggcggcctggcaggcctcgcggccgccgccggcctcgccgcgaacccggcggccgcagcccccgccgccgcccggctcccgcgcatcgacgatctgggccccgctgtgagccagttctccctcatgagcgccgtactgaccggcgacaccgtccacatcggctcccgcaacatcgaacccgtccagatcatctccgtacacctgccgacccgaaaggtggtggcccgcaccgagctgtccaacggccactccatccaggcgctcgccgcggacgacagcggcaggtacctgtacgccggaatcctccagaaggcctccggcgaccggcccaacctcttccgctgggacctgagcacccccgacgagccggccgaacccctcggcgccatcggcgaccgcgacgtccgcgccctcgccgtggcacccgacggtgtcgtctacgcggtcggcggcggcagcagcggcgccccggccctgtgggagtacgaccccgagaccggcaggatcagcaacgtgggaaccccggatcccagggccaccctcgcacgggccgtcgcggcgacccgcacccacgccttcttcggcgcgggcaccaccttcaacggcggcggggacaccagcagggccgccctctacgcctacgaccggtccgccgggaccttcacctcgatcgcgcccccggagatgctgcgcgacccgagcatccgcgacctcgcggtcctcggggaccggctcgccgtcagcaccgccggttccacggaggacgcgaaggtcgccctcatggacctgaaggacctgtcctcgtacaagatcgcgacctcgatcggcaaggtcgccaagtcgttcaccatgaccggcgacaccgtccactacgccaacgaatccggtctgctcgcctacctgccgtccgcgaacaccgtgacccccgtcgcgtacgacggccccggactcggcgagatctggggcgtggacagccgcgcgggcaaggccgtcgtcacctcggccttcggcttcgtggccgagatcgacccggccaggaggaccgccgccgtcatcgatctcggcaccgccggcgcccccatggccccgcagacggtcatgggcatcgccgccggcggcggccacgtctacgtcggcggaaacgcgacgatcgcccgccacacccccggccgcgacacggtcgtcaagctccgcgcacccggcgaggccaaggacgccgtcgtcgtcaacggcatcctgtacaccggccagtacaactccgagggcatctggtgccacgacccccgcaccggaaagaccggccaggtggccgccttcccgtccgagcagaaccgcccgctggacgtcaccttcgacgaggacaccggtctcgtgctcgtcggagtgcagtccgacaccgagggcggcggcgccctctggacgtatcaccccaggaccggccggcaacggagcttcgccgacccggtcgacgaagcgcagtgcgtccggggcatcgcgagccggaacggcgtcgccttcctcggcggcgacaacaccgcccccaccggaccgcgcagcaccgtcgtcgcgttcgacccggtggccggccgggagctgtggcggatcgacccgcaacagacggcgggcaccgccgccctcgcggtacgcggacggcacctctacggactgtcccgcaagggcggcctcttcgtcatcgacatcccgcggcgcgaactgatccaccgcgcggacgtcacctcggtcagcaacgggttcgccgccctggtgaccaaccgcggtgtcgtctacggcgtctccgacaccaccgtcttccgcttccaccccaggaccttcgccgtctccgtcgtcgtccccgacatcgacggcggctggtacagcggcgcgcacatcaccaacgacgagcacggccggctctacaccatgcggggccgcaacctggtccggatcaccgaccgccccggccactgacgtcggggtgtctccccccaccccgggcaccccgcgccatccccccacgccctcccagggagcttccatgaagaacgcgcacaagaggatctgcatcgccgtctgcctgggcgccgtcgccggcgccggttacgccacgaccgccaccgcgacgccggagaagtcggcccggccgcagcaggcgtccgacctgctcgacgtcgactacgagtccggggccctcgactccggcatccccgggctgaccacgacgcacgccaaggcctcggacgcctccacggtcgagagcggcggcgacgggagcgcacactcggtctcgcacaaggtgacgctgaacgacccggattacgtctccgacggcgcaccccgcagcgagagcgcgaacaacgagatcgagaagtcgctcatccacgtgggcgacgtgcaccgctacgagttcagcgtcatgctcaaggactgggagaccagcagcagcaaggcgggcgacatcatcttccagggcaagcacgcgggcgggaacaagccgtcgttctacctcatggcacagcgcaacgcgatcgcgttccgctccccgctcctcgacctgcaggcgccggtggtcgaggacttccgcccctatgtcgaccagtggatgcggttccgcatcgacgtccgctgggccgagagcaggaccggctactacaaggtgtccgtccggctcccgggagagaaggacttcaccctcaagaagacgtacaccgacgtcaacaccttccacccggagaaccccacggccttcggctacatcaagtggggcctgtaccgccccgcctcctcgacggaagcgggcgatcccgcgacccgcgtggtccggcacgacgacatccgggtgatcgacctcgggtgagctcggcgcggggtgatcgcctgccgcaggcggtcaccccgcggtcacgtcgaccagaccaccttgccctggtgcacgatgaccaccttggcgtcgggcctcagcaccatctgggcgccgccaaagtcatgcgtcttggaagcccagatggcccggtcgtcgccgttgtggatgaccaggttgccgtcgggctggaagatcgcccggtggttctcgccgaaggtcatggcggcccagatcggcttgttccgctcgttgtagacgacgaggttgccgtcctgctgcatcgtcatgcggatgcggttggtggcccaggactggccgaccccgatggaactggtcgcggagaccgtctgggtgccccagtccggcttcggggccgccttgggcttcggcttcggtgaggccttcggcttctcggcgggggcgctcgtccggggtgcgggcgaaggggccacgggtgcgggagcggccttcggcggggtggtcttcttctgttccgtcggggacggcgtgggcttcaccgccacgtagtcgtccagggccgccggggccgactcggggttgaggaccgtgtcggcgctcccggccaccggtgccgtaccgctgttacggggcttctcgtcgttcgcgctgcccatcagcagcacgggtatcgcgaccagtgcggcgccgacgaacgccgcccccgccaggaccggtgcgcgggggcggcccctgtcggcagcggtgagggtcttggtgtccggcttcgcggcgacggccgctgccagggcgatggcctccgtgcggccttcgggtgcttccgtggttgtggttgtggccggggcctgggtctgggctttttcggtaccggtcgttgcggcgggctcggtcgggggctccccggtgccggccgtcgtggcggcctcgctccggggcttccgcgcctcggccggggcggcggacggcggggcggcggggccggactcctccgtggtgggcggcagggaagcggtgccggacttctccgtggctgccgccgcggactcggtgccgggggcggggggctcggggggcatgcgctgactcctcctcgggggcgagcccaacgtagcccgtcggacgagcgggagaagccactcgcctcgatacgcccctgtcgctttgtcatccctcgccgagcctgtcccggaaagttcctcactcgggcagagaacgggcaggtaaacggcctatacgggcctgcggccggaccccgtgaacgaggctcgtatgacatcctgttggggccgttcggcactcacatattcgtacggagccaagagttcaggtggatgcctccctcgtgccggaagccgtgaaggacgccgcacgccgtgcgcccggccactgggtcggcatcgtcgatccggagtggacgcaggcgcggacgcccccggagtgggccgtgctgggggagtggcagtcggacgagagcgggagcgtgggcgagtaccgcgccaaccccggctaccgtccctccgcccgggtcctcggctggccggagcccaccgatccggtggacgcggccgcccagcgggccgccacggggtacggcacggtggacgaggcgctggccgcactcgcggaggcggacgtcaccgtcgtacgcgggcccgacggcgggccactcctggccgcggggcgggacggggcgctggtggcgctcctgttcacctcgcccacccacgcgttcatgtccgcggcacttcaccatgacaccgtgtccgcccgggagctggccgggtcgctggcgcagaccggcgtcctgctgtcggtcaacgccggtgccgcggctccgctgctcgttcccaccgacagccttgccggtgccgtgagttccggcccggagaccgcggccgacggccccgcgccgaccgaaccctggccccacaccacagggagaaccccgtgacgcgttcgtcgtcccagcagccccccgcctccgcttccgctcccgcacaggcgaagaccgaagccgcgccggccgaggccaccgaggcggagaaggtcaaggaggtcgaggagggggagaaggccgagcagggcgagcgctccgaggcccagtcctccgagcgccagtccccccaggtccaggcccaagcccccggcgccggggcggaaaaccccaaggcgcccaccgcctccgagaccgacccggaccccggcgcctccgccgccgcccagagtcggctccccgccctcgtacggaccatgaccgccaccgccatcgggaagccgcagcaggaggcggggcccgtggggcggccgggcaaggccgcgctcgcgggggcggcggtcgtgggcgcgctgctcgtgtcggtgcccttcctcgtgctcgccgggaacaacgacgacgggcccgagcggacgaaggccgccggggccgggaccgtcctcgacgggagcggaccggaggcgccgggcgagttcgccgtcaccgcgcccgaggccggcgcgcccgccgaggacagggagaagagggagaaggacgaggcgaagccggagaagggcggcaatcccgttccggccatccctccggggggcggcggcaaagcggagacgaaggaggacaacgcccccaacgacccgccgaagaaggccgattcgtccaaggggaagtccaaggagcagcccgaggcgggcagcggcggcggcaggaaccagccggccaaggcccagcccgccgtcacgttcagcgggcccgtctccttccgcagccacctctccggccgctgcctcgacgtccccgggcacaacttcaacgacggccagccgctgttcatgtgggactgcaacggcgccgacgcccagaagtggcgcttcggctcggacggcacgatccgggccagggacaagtgcctggacgtggccaacgccgacttcgccaacggctcccggatccagctcgcctggtgcaacggctccgccgcccagaagttcaccctgaacggcgcccacgacctggtcaacaccgtcgtcggcaagtgcgtcgacatcccgaaccacagcaagggccggggcccggagacctacctgatcctgtgggagtgcacggggctcgacaaccagaagtggagcacctgacccaggcgcgggcagcgagacatgatgagatcgccggagcgccgaaccctgtccccggcgaagaggggcgtccggtcaggacgccgccgtagcaaggaggttggtgcgtgtcgcgccaggtactgacggtcggccccgcggaccgcttttccacgatcggtgaggcgctcgccgccgcccgtaccggtgcgctcatcagcgtccggcccgggacgtacgcggagaacctggtgatccacacccgggtgaccctcaccgcagccgaggggcggggcacggtggagatccggccgcgttcgggcagcgtcgtcgcgctgcgcgccgacgccgtcatgctctccgaactcaccctgcgcggcggggactccgagctgcccgccgtcgacgtacggcgcgggcaggccgcgttcgacgggtgcgagatcgtcggcgcggcctggaccgcgatgctggccggcgggaccgggtccctcgcgctgcgggactgccgggtgagcaacccgcggggcgcgggcatcgtggtcacctccgccacccccaccaccgtcgagtcctgcacgctcgaacacctcggcaccagcggcatcgtcctcgccgagcagggcgaggcgcgcgtccgcgactgcacggtgcggggcgcccggggcaacgggctgctggccaacggcgagacccggggcaccgtcgaggactgcgacatctcctccaccgacaagccctccatcgccctggagggggactccgccgtctccgtcgtccggaccgtggtgcatgacaccagcaccggcgtgcatctgagcagcgcgggccgcaccaccctggaggacgtccgcgtcaccggcgcctccggcaacgggatcgtcctcgccgtgggcaccgaccccgtactgcgccgctgccgtgtctcgcgcgcacgggggcacgggctgttcgtcaccgaccgggcgcgcggcaccttcgaggactgctgggtggacggggcacagggcgccgcgctgcgggtcgccggggcctcctccccggcgctgaccggactgaccgtccgcgactgcgaaggggccgggctgcttctggaggaggacgcggcgcccgagctggaccgcctggaggtcatcggctcctcgcccgccgtcgctctgcagggcggcgccaacccgctgctgcgccgggcccggctggtcgaacccgccggtgacggcatcgcggccaccaaggacgcccggggccgcgcagaggactgcgagatcgtccgcccgaagggcgccggtgtacgggtggcctccggctccaccctctacctggccggtggcggggtctccgacacggccaccaacggcctggtcgtggaggacggcggcaatgtcaccgtccgtgacttccgcgtcgaaatatcgggtgaggagggtgtggtcgtcgccgccggtggtgaactgaccgccaaccgcaccaccgtccacgcccccaagggacacggtttcctcctccgcgagggcgctctcgcctcgctcagcggctgcgaggccaacgggggcgcccaggacggcttccgggtcgagtccaccgccccggtctcgctcgtcaactgcaccgcccgcgagaacgagggcggcggcctggtgcagaccgcgcccggcgaacggctcgccgtggacggcctgaacagcgtcgggaacggcaagcgcgacgcctggggcagcggcagtgccgagaacaccgacccggccgggtccggcgccgccgacgcgcccccgccggaccgtgcggacggcccgctcggcgccctcaacgcgctgatcggcctggagaacgtcaagcagcaggtccgcaccctcgtcaacctcacccagctcgcccagcgacgcgagcaactcggcatgcccgcaccgccgatgagcagacacctgatcttcgccggaccgcccggcaccggtaagaccaccgtcgcccgcctctacggggcgatcctggccgagctgggctcgctgcgcagtggacacctggtcgaggtctcccgcgcggacctggtcgcccaagtcgtcggcggcactgccatcaagacctccgagaccttccaacgagcgctgggaggggtcctgttcatcgacgaggcgtacaccctcaccgccgacagcggcaacggcggagccgacttcggccgcgaggccgtggacaccctgctcaagctcatggaggaccaccgcgacgacgtggtcgtggtcgccgccggatactcccgcgagatggaatccttcctcagctccaacccgggcctcgcgtcccgcttctcgcggaccgtcgagttcgagaactactccgtggacgacctggtcgcgatcatggagagcatgtgcacccagcaccagtacgagctgggggagggcacggcccaggcgctcgccgcccacttcggggccatggaccgggacgccggattcggcaacggccgtgccgcacgcggggtgttcgaggagatggtggaccggcaggcgatccggctctccgcccaggcccaggtcagcgagaacgatctgcggctcctgctccccgaggacgtctccgccaccgccgccgcctcggccgccgagaccgccgtaccggccgacgacccgctcacccgcctgggcgacatgatcggactggccggggtgaagcgtgaggtcgccgatctggtcaacctcatcaccaccgcccgccaccgcgccgccgccgggctgcccgtccccaccctcagcaaccacctggtcttcaccggcccgcccggcaccggcaagaccaccgtcgcccggctctacggcgaggtgctcacccagctcggcgtgctggagcgcggccagctgatcgaggccgcgcgcgccgacctcgtcggccgctacataggccacaccgcccagttgacccgtgaggtcttcgaaaaggcccgcggcggcgtgctgttcatcgacgaggcctacaccctcaccccgcgcggcggcggcgccgacttcgggcaggaggcggtggacaccctgctgaagctgatggaggaccaccgcgacgaggtcgtcgtcatcgtcgccggatacaccgacgagatggaacgcttcctcgcctccaaccccggcctctcctcccgcttcccacgccggatcgccttcgccgactactcctccgaggaactggtcaccatcgtgcgcgcccaggccgccgccatggggtacgagtgcggccccggcaccggaccgctgctcaaggagcacttcgacgcggtaccccgcgaccggtccttcggcaacgcccggctggcccgccaggtcgtcgagtcgatggtcacccgccaggcgggcaggatcagttcgctggccgcgcccaccctggacgacctgcgcatcctcctcccggcggacgtcacggccgcggccccgaaggcggtgcagcagtgaggccgcccgcgcgacgggcgaccgggaggccccgagcaggccggctgttgtacggggtctcgctcgccgccgccctggtggtgccggtggccgtacccgcccaggcggcacctgtcacccttacaccggccgctgacggggccaagggacaggagctgcccgggatgcccaccgcgctcgacgcgcgggccgaggccgtcgcctgcacccccgcctccaaggagcaggcgaagaagcaggactggtcgcgccagcgcctcgacctggaccggctgcaccggcacaccaccgggtcgggggtgaccgtcgcgctgatctccaccggcgtcgaccccggggccgagggactcgacggccgcgtgaccgcccagggccaggccgccgacgactgcgtcggacaggggacgttcctggccgggctgatcgccgggaccggcggccccaccccgcgcctcgccggggtcgccccgggcgcgaagatcctcgccctgcgcggcaccgaccggcgcgggcagccggaccccgcgctcgtcacggcggcggtacgggccgccaccacggccgaggccgacgtcatcgcggtcgcggtggcccttccccgtaaggacaccgcgctcacccgggccgtcgccgaggcccgcaaggcgggggcggtggtggtcgcgtcggccaccccggagccgccgtcgcgcggctcggccgacgagatcccctcgcgtacctactggcccgccggtgagcccggcgtcctcgcggtcgccgacatgctgcccgccggggcccggccggacgccgccctccccaccgagggcatcgatctggccgccccgggcgccggagtggtctccggcgggccgcgcggcaaggggcactacctcggcggcggggtcgcggtggccaccgcgtacgcggccggggccgtagccgctgtccgcgccacccaccccgaggcgacggccgacgcggtggcccgtcggctgaccgccaccgcgtacccggccgacatcccccagctggacgtctacgccgccgtcaccacggtcctcggcgacgcgggcgcgccggtcggcggtgcggagcgggccgccgaacccgtggccgtacgcgacacctccgacaccgaccgcgccaccggccgggccgtcctcttcgtcctcctcggctcggcgggcgtcctctccctcctctgggccggtttcgccgtcacccgggcccgcgcccggggctggcgaccggcgggggcgggcaccccggaccagggctgaacgtggaaggggccccctccggccggagggggmmccttccacgttcgctcggtcctattccaccagggccgtctgcaccagccgcggcttgcggcgctggatgtgcagggcccggcccggcggcaggttcagcggcttcgcgttgccgaacaggcggccctccgtgggcgggcaggagagcaggaccgccgggttgttggcctcgtccaggcggcggatcaggccgtcgctcagaccgcgccccgctcccatcgcgctgcgggcgacgaccaggtgcaggcccatctcgtagccgagggtcagatgctcgaagagcggctcgaaggggctctggaacgagttgcccgacaccatgtcgtagtcgtcgaccaggacgaacaggcgcgggcccgtccaccagtcgcaccggcgcatccgggcgggtgagatgtcggccccgggcacccgggtcttcatcgcgcgggccgcgccctcgatggtctcgttgaggttgtcgagggagatgacatgcccgatgcggtactcctcggggatggcgtcgaccagggtgcggcggtagtccaccgcgatgatcttcgcctcctcgggggcgtaccgggcggtgatgccctgcgtgatcaggcgcagcagattggtcttgccgctctcggtgtcgccgaccgcgatcaggtgcggcgtccggctgaagtcgtgccagaccggctccagcgcgtcctggtcgagaccgagcacgaggcgcatgccgccgccctccgtggcctcgggggaggggagttcggagaccggcagccggtgcgggagcatccgcacctgcggggcggcgggaccggaccagtgccgggagatctcgccgacgaggtgggccacgccctcgcccagatcctccagggagccgctgccgtccagccggggcaggcccgcgaggaagtgcatcttgctgtcggcggtgatgccccggccgccggtgcgcggcaccgaacgggccttgcgggtgtcgatctcggagtccatcggatcacccatccgcagttcgaggcgggtggcggcctggtcgcggacctgcgcggacagctccacccagcgggtcgtggtgatgagcagatggatgccgtaattgaggccccgggcggcgagttcgttgaacttcgggatcaggccgtcgtagtcctggcggaccgtggaccagccgtcgaccaccatgaagacatcgccgaacggctcgtcggggaactccccggcggcgcggcgccgccggtaggactgcatggagtccagcgtgtggtctacgaagaactgctcacggcgggccagcagcgtcatcacctcggccaccgtccggtgcacccgctccgggttgagccgcgccgcgactccgccgacgtgcgggagcgcggcgagctgggagaggccgccgccgccgaagtccaggcagtagaactgcacttcggccggggtgtgggtgagcgcgagggcggcgatgagggtccgggcgaccgtggacttgccgctctgcgaaccgcccgcgacggcgacatggccgcccgccccggacaggtccacgaccagcggatcgcgccgctgctcgaacggcttgtccaccaggccgaccggcacccgcagcttccccgtgcccgcccagcttgccgccatcagcccccgctccttgtccggcgtgatcccgggcagcagcgcgtccagcggggacggctcgtccagcggcggcagccacacctggtgggcgtccggcccggagccgcgcagccggtccagcgccacatcgagcagcgcctcctcgtcctcggcctcctccgtctccggctccgggtcgggcggtgtctccagggtgcgcggcaccacccatccgctggtccacggcaccacctggctcgccacccgggcctgcaccaccgcaccggtcctgcgccggtacgtccccgaggagtacgcggcacggaaccgggtcagggcctccaccccggacttcagatagccgctgccgggcgcggcgggcaactcgtaggcatcgggaacgccgagcacgccacggctctccatcgcggagaaggtccgcagcccgatgcggtacgacaggtggctctccagctggtgcatacgcccctcgtccaggcgctgtgaagcgagcagcagatggacgcccagggaccggccgaggcggccgatcatcacgaacagctccatgaactcccggtgggtggagagcagttcgctgaactcgtcgaccaccacgaagaggctgggcagcggtgccaggtcggcgccggcggcgcgggcccgctcgtactccagcgccgaggtgtagttgcccgccgcgcgcaacagctcctggcggcggatgagttcgccgtgcagggcgtcctgcatgcgttccaccagggcgacttcgtcggccaggttggtgatcacggcggaggtgtgcgggagttcctccaggccgaggaaggtggcgccgcccttgaagtcgaccaggacgaagttgagggtctcggaggagttggtcagggcgagaccgaggacgagggtgcgcagcagctcgctcttgccggagccggtggccccgatcagcatgccgtgcgggcccatgccgccctgcgcggactccttgatgtcgagctcgaccgggcggccgtccaccccgaccgcgatcggcacccgcagccggccggagccggagtgccgggcgaacagggtccccgggtcgtgccggtgcagatcggggatgccgagcagggtggtcagctcgacatcggtgtccagcggctgcgcgatatccgtgccgaggctcatccggcgcggggtgagcagccgggccagcgcctccgcgccgagcgggccgagccggtcggggcggccgagcggcaccgtgcgctccttgcggctgcggtcggtgcgcaccaggttcacctggccgggccccacggtgaggcgcagcgtgttgcggccgggccgccagcgcagtgccccggacacgtccaggatcagggcgttgcggtagccgtggccctcccagcggtggccctccgggacgctgacgccgtccaggacgacgacggtgtacggctcgtcgcggccgggccgggcgtccgggtcgaacccggggcgctcggcgaactcggcgccgagcagatcgtccagctcggtgaggtctgcggtgatccggcgggcctgccccgccccgtcctcctcgtgcggatccagcacgtgcggcagccacttgacccactcccagtcggcccgccgttcgtcgctgacgcagaacgcgatccacagctcctcgggcgcgtggaacaccgccaactgcccgagcatcgcccgcaccagggcccgtacggcgtcgtgctccgggggatgagcgccgggcgtggcaccgtccggcgcctcctccggacgcagcaggatcc

SEQ ID NO: 107 - DNA, 2868 bp, Streptomyces roseosporus
tcagcacgcgcccgccgggcggtcccgcttcacgacgttcgtgtaaccggtcgtgccgtccagccagacgacgcgcttgccctcgtcggccgaggcgtagacctggtcgccgcggttgcaggacacgcgctgggcgccgcccttgccgtcgggtgccacctggaacagcttcggcagggtctcgttggcccatgaggtggccggcggcagcgaggtgacgttgaccgcgtcgtcggaggccgtcagctggtaggcgtgcagggagccttggccggtttcggggacgaccgtggtgcggttcgtgccgtcggcgtcggcgcgcacgacggcggccttggcggggtcggtgccggcgccgtcctcgatccagaagacaccgtcgtcggtgaaggccgtctggccgatgccctgcgcgccctcggctccggccggcatcatccgggtggtgccggtggcggtgtccaggaccccgatgcccagttggacgtcgctgccgtcgatccacatcgtggcgtaggcgatcttcccgtcccggatcgagggcatggccgtgacctcgatgcccttggcgaggatcatgcccgcctcccgggtcctgatgttgatgtagccgatctgctgccggccggtctgcgggttcgtcaccgtgtaggcgaggaagtcgccttcgaggacgagctgcgagacattggctccgacgccgccgacgaccctggccgggccgccgcccaccggacggacatggaagaggaccgaccccggggagaactcggcccaggcgacgttcttgccgtccgtcgtcgcgtagacgttgtagttgccgttgttgccgctcaccagctgcggcttgcccttgccgtcggtgttgccgagccacaccgagtacggttcgctgccttcctcgtcggagcgggagacggcgtacttgccaccgccggcgccgacgccggtgcccgccacgttgaccttggacacgagggtgtccgtgtcgacaccgagcgccttctcccagccggggacgatgccgtgcgcgtcgaacgaacgcttcacgatcttcgtctgcgccttggtggcgcccagctcctgcgctgcggcgatgaccgccgcgcggccctcggtgaagccgtcgagcggcgtcatgtacgcggacagcgcgcggtagacgatctggtcggccggctcggcgccgaggtcctcgcgcatgtcccacagggcgcccgagaagatcgtggagttgaggtgtacgccaccgttgtcgccgttgtggctgacgccgatgaagtccttcgacgtggtggcaccgtcgttgaggtcccgcagcgcgcagtcgcgcgggccgagcgtggtgcacaggtcctcgccgagcagaccggcgtccgggtcgtccatcgaccggccgtcggcctccaggtcgatggcgttgccgaagtagtcggctatcgcctcgttcacggcgccggactggcccgcgtacaccaggttcgcggtgtgctcgatgacaccgtgcgtcatctcgtggccgaccacgtcggtgtccgccgagaaggtgcggtagtcgccgccgccctggccgtacaccatcttggtgccgtcccagaaggcgttgttgaacggcttcccgccgttcaccacacccacgagcgagtacatgaacccgtccttgccgtccaggctcttacggccgaagtggttcttgtagtagtcgtagaccttcccggccgcccagtgggcgtccaccgccccggagtcggtgaactccttgcccaggtcgggggtgtccgagcggaacgtctggatgccgctgggccacgtgccggacgccgtggcggcctcccggccacgcgcgtcccaggtcgacagcagcggaccgtcgtacgggctgtcggcgccccgcttgctgtagtcgtacatctggtaggcgccgtcggcgccctggtacaggttgatctcggcctcctcgccgttgtagcgggtgcccgagcccttgacgaccagctgctgcgtggcctccgcggtggcgtcggccgtgggcgcgtcgccggtggcgccgctgctcgtaccggcgcccgaacccggtgcgccgaacgacttgatgccgctgtactgcatcacggggaagccggagtgggcgtcgatgtacacctcctgcttcaccggcgtgccgtcggccgggctgacgccggtgacggtgatgtgccgggtcagcacaccggatccctggggcaggacggtcacgtcaccggccgtacccgacagctgaaccccgccgggcttctcgcccttggccggggccctgagcaggcccccgcccagctgcgcggagacggcgccgaccgcgcgctcgatcgcggtcttctcggagacctccggcgtcaccgtgtcgagcttcagctcggtgaagtagctgccggacgtgccggtgacggtgcgcttgccgtccttcttcgtcatccggaccaggtactggccgccgaggaccgtgacgccgcggtacttctgctggagacggaccgtctccctgccgcccctcccggtcgtggtcccggccgcggccaggtccttcgccgaggtgtgcgcgatgcggtagcggctcttcttcgccttgaggtggccacgggcggcgtccgccgcggtgccggtggcgtcggcctcctcgttgagtcccgtgacgagcgagggggtcccggtcccggcacccggcgtcacctcggacgcggcggacgtggtggcggtgtccgcgtgagcggcgggcgtggccgtcatcaacaggcccgcggcggccagtaccgccaccacgccctggccgacgaacgtggtgccggacccctgacctggtccggccgatctgctgcgcgatgaactccgcac

SEQ ID NO: 108 - protein, 955 aa, Streptomyces roseosporus
VRSSSRSRSAGPGQGSGTTFVGQGVVAVLAAAGLLMTATPAAHADTATTSAASEVTPGAGTGTPSLVTGLNEEADATGTAADAARGHLKAKKSRYRIAHTSAKDLAAAGTTTGRGGRETVRLQQKYRGVTVLGGQYLVRMTKKDGKRTVTGTSGSYFTELKLDTVTPEVSEKTAIERAVGAVSAQLGGGLLRAPAKGEKPGGVQLSGTAGDVTVLPQGSGVLTRHITVTGVSPADGTPVKQEVYIDAHSGFPVMQYSGIKSFGAPGSGAGTSSGATGDAPTADATAEATQQLVVKGSGTRYNGEEAEINLYQGADGAYQMYDYSKRGADSPYDGPLLSTWDARGREAATASGTWPSGIQTFRSDTPDLGKEFTDSGAVDAHWAAGKVYDYYKNHFGRKSLDGKDGFMYSLVGVVNGGKPFNNAFWDGTKMVYGQGGGDYRTFSADTDVVGHEMTHGVIEHTANLVYAGQSGAVNEAIADYFGNAIDLEADGRSMDDPDAGLLGEDLCTTLGPRDCALRDLNDGATTSKDFIGVSHNGDNGGVHLNSTIFSGALWDMREDLGAEPADQIVYRALSAYMTPLDGFTEGRAAVIAAAQELGATKAQTKIVKRSFDAHGIVPGWEKALGVDTDTLVSKVNVAGTGVGAGGGKYAVSRSDEEGSEPYSVWLGNTDGKGKPQLVSGNNGNYNVYATTDGKNVAWAEFSPGSVLFHVRPVGGGPARVVGGVGANVSQLVLEGDFLAYTVTNPQTGRQQIGYINIRTREAGMILAKGIEVTAMPSIRDGKIAYATMWIDGSDVQLGIGVLDTATGTTRMMPAGAEGAQGIGQTAFTDDGVFWIEDGAGTDPAKAAVVRADADGTNRTTVVPETGQGSLHAYQLTASDDAVNVTSLPPATSWANETLPKLFQVAPDGKGGAQRVSCNRGDQVYASADEGKRVVWLDGTTGYTNVVKRDRPAGAC

SEQ ID NO: 109 - DNA, 1026 bp, Streptomyces roseosporus
gtgacaattccgccggtggggcggactgggtgggacacgcaatggcaggcgctcgggctcggagcggacgaactccgggtgtacgaagcgctcctcgacgcacccgtacccgcctcccgtaccgccctcgcccagcacctggggctgaccgtgcgccgggtcacgaacgccctggatcacctggccgagcgccgcttcacccacccggcccggggcgccgggctgcccgtggccatggcccccgccaccgccctgcgcaatctgatccatctgcaccaggcggaactcctgcaccgatcggcggagttggaggagctcagcggatccgtcgaccggatcgcggcccaactgctgagctccgtgcacaccccccgcgccaccggcatcgagacggtccgcggcggagcggcgatcgccgcccgggtggcctccctgctggtgtcggcgagcgaggagatcgccctcctggaccggccgccgtacgcgtcgagcgagccggacgggatgcccgtccccctcgacatggccgaaccggtacgtcggggggtacgcgtccgggtcgtggtggaccgcgaggggctgagcttccacgggcgcgcccgcggcctgggcgatctggccgtgcagggggtgcagatccgggtgggcacggatctgccgacgaagctgatcacggtcgaccggcgggtgaccctcctgccgccgacggacgcggcggacccgacggcctccgcactggtggtgagcgacgcgctgctgagcaacgcgctggtgccgctgttcgagtcggtctgggaacgggcgctccccatcggctccgtgacgcatgatcagatcacggacggcgaccgggagttgctgacgatgctcgcctccggcctgaaggacgaggcgatggcccggcgcctcgacatccatgtgcacacggtccggcgccgcatcacccgtctgatgcaggtcctcaacgcggagacccgtttccaggccggggtacaggccgcgctccggggctggctcaccgggtga

SEQ ID NO: 110 - protein, 341 aa, Streptomyces roseosporus
VTIPPVGRTGWDTQWQALGLGADELRVYEALLDAPVPASRTALAQHLGLTVRRVTNALDHLAERRFTHPARGAGLPVAMAPATALRNLIHLHQAELLHRSAELEELSGSVDRIAAQLLSSVHTPRATGIETVRGGAAIAARVASLLVSASEEIALLDRPPYASSEPDGMPVPLDMAEPVRRGVRVRVVVDREGLSFHGRARGLGDLAVQGVQIRVGTDLPTKLITVDRRVTLLPPTDAADPTASALVVSDALLSNALVPLFESVWERALPIGSVTHDQITDGDRELLTMLASGLKDEAMARRLDIHVHTVRRRITRLMQVLNAETRFQAGVQAALRGWLTG

SEQ ID NO: 111 - DNA, 1116 bp, Streptomyces roseosporus
tcaccgtcccgccgagacgggcgcggtgccgccgcaggacgcacggatgatcaggttgggccacaactcgactcggtgcaccgggcgttcgacgggatcgacggcgcgtgccagggccatttcggcggccaggacgccgagccggtgcttctgcgggcgcacggcggtcaggggagggtcggcggcggctgccacctcgtcgtcgtaggtgatgacggcgaggtcctcggggaccgcgagtccgtgttcgtgggcgcgctccaccaggccgacggcctcaccgtcggagtggacgaacagggcggtggcgccggcctcgcggcagctgcggagggccgcgtcgtaggcgtccgcccagccgggggagccgtacgacggtacgtcgtgtgcgaggccgtcgccggagggcaggccgagagaggcggtggtctcctgccacccctcgcgcagggccttggtggtggggctgaagcgcgcggtgacgaaggcgatacggtgatggcccagggtgaccagatgccgtacggccaggcccgcgccgaggctgtgggcggtggtgacggcgtcgagcggcagggtgggcagagcgggcggcggcagccgttcgacgaggatgacggggacgttcagcgagcccagccagcgcagcaggtcctggccggcctcgccggtgttggtgggggcgacgagcagcgtgcgcacaccgcggtcgaggaggccggtgacctggcggcggtcctccgccgcgtcgtaggcggaagcgcgcaggaccagccgtcccccggcggcggccaccgccgactgggcgccctggatgaccgccggccagtagtactcgacggtggggacgaccatgccgacgaacgcctggtcgggcaggcggccgtgggtgaacacgccccgggtggcccgctcgtcggccgtcggcccgcgataggggagggtgacgcctccgtggacgcgcgacaccagcccccggtcggccaggatcgtgacgtcccggcggaccgtcacggcggtgacgcccagccgctcgaccagatcggccaggcgcacggtgccgcgttcccgcacggtggcgaggatgaactcctgccgttccgatgcgagtgccat

SEQ ID NO: 112 - protein, 371 aa, Streptomyces roseosporus
MALASERQEFILATVRERGTVRLADLVERLGVTAVTVRRDVTILADRGLVSRVHGGVTLPYRGPTADERATRGVFTHGRLPDQAFVGMVVPTVEYYWPAVIQGAQSAVAAAGGRLVLRASAYDAAEDRRQVTGLLDRGVRTLLVAPTNTGEAGQDLLRWLGSLNVPVILVERLPPPALPTLPLDAVTTAHSLGAGLAVRHLVTLGHHRIAFVTARFSPTTKALREGWQETTASLGLPSGDGLAHDVPSYGSPGWADAYDAALRSCREAGATALFVHSDGEAVGLVERAHEHGLAVPEDLAVITYDDEVAAAADPPLTAVRPQKHRLGVLAAEMALARAVDPVERPVHRVELWPNLIIRASCGGTAPVSAGR

SEQ ID NO: 113 - DNA, 1353 bp, Streptomyces roseosporus
gtgctcggcttctcctccgacgccggtgacagcgcacacgcccctcggacgcaccgatcgcggaggtccctgctgcggacctccgcgggcctgggggcagcgcttctcgccggcggcacactcaccggctgttcgggccggacctccggaaccgtccgggtccgtatgtggtcgtggctgaccggcatggaccggtacgtcgccgcgttcaactcctcccagcgcgacgtccgggtcgacctgagcgtgatcgccgccggtacgtccgggggctacgcccagcagaccaacgcgatccgcgcccacaacgccccggacatcctgcacgtcgagtaccaggccctgccgcagatcgcgaccaccggcgggctgcgcgatctgagcgcggacgtggacgatctcgccgacggcttcctgcccgccgcgtggcagagcgtccgccccggcgggaagacctgggcggtgcccatggacttctgcccgatggcgttcttctaccgcaaggacctgttcgaccgggccggcatcggagtgccccgtacctgggaggagttccgccgggccgcctcggccgtccgcacggccgaccgggatgcgcggatcaccaccttcccgctcaacgacggcgccttcttcgccgggatggcctgccaggccggcgacccctggtgggacatcgccgggaacgcgtggcgggtcgggatcgacggcgcgggcacgatgcgcgtggccgagtactggcaggacatggtgtcctccggtcttgccgcgcgcgacgccaccggcacccagagctggatctccgcgatgcaccacggccggctctgggggatgctcggggccacctggggcgtgggcatgctgaagaagtccctgcccgcccaccarggccgctgggcggtcgcacccctgcccacctggggcgacgacccgtccaccggggtctggggagggtcggcgttcggggtctccgccgagagcgaggtgcccgaggccgccctgacgttcctgcgctggctcagcaccgaccccgcggttccccggatcggctcggmgttcaccttcccctcgcccgctttcctcgccaaccggaaggtggcccgtaccgcctacgaggacgggtacttcaccggcgaccccgtcttcgacgtgctggacgagtccgcgacccgggtccccgggtggacgtggggcccgacctcgctgagcaccttcgccacgatcgccgaggcgctcggcccggtctccaccggagccaccaccatcccccgggcgctgcaccgggttcacacctcgaccgtcgccgcgatgcgggcccgcggcctggccgtcaccgaagggagccggacatga

SEQ ID NO: 114 - protein, 450 aa, Streptomyces roseosporus
VLGFSSDAGDSAHAPRTHRSRRSLLRTSAGLGAALLAGGTLTGCSGRTSGTVRVRMWSWLTGMDRYVAAFNSSQRDVRVDLSVIAAGTSGGYAQQTNAIRAHNAPDILHVEYQALPQIATTGGLRDLSADVDDLADGFLPAAWQSVRPGGKTWAVPMDFCPMAFFYRKDLFDRAGIGVPRTWEEFRRAASAVRTADRDARITTFPLNDGAFFAGMACQAGDPWWDIAGNAWRVGIDGAGTMRVAEYWQDMVSSGLAARDATGTQSWISAMHHGRLWGMLGATWGVGMLKKSLPAHQGRWAVAPLPTWGDDPSTGVWGGSAFGVSAESEVPEAALTFLRWLSTDPAVPRIGSEFTFPSPAFLANRKVARTAYEDGYFTGDPVFDVLDESATRVPGWTWGPTSLSTFATIAEALGPVSTGATTIPRALHRVHTSTVAAMRARGLAVTEGSRT

SEQ ID NO: 115 - DNA, 798 bp, Streptomyces roseosporus
gtgctgatcccgatcgggtacgccttctacctcagcctcttcgccgaccgcctctccgggctcggcttcgacgggtaccgccaggtcctcaccggcttcgacaactacaccgacgtcctcgccgacccggccgcccgcgacagcgtggccaacgtcgcccgctacgccgcgatccacatccccgtcatgttcggcggcgccctgctcatcgcgctgctgctcaactccgccaccgtacggctgcgccaactctggtccctggcggtcttcctgccgtacgcggtgcccggtgtgatcgccggtctgatctggggctacctctacagccccggcatcggcccgctcgccgacgtcctgccgttcgacccgttcggcgagtccggagtgctgccctcgatcgtcaacatggccacctggcagtggacgggctacaacgtgatcatcttctacacggccctgcagaccgtgccccgcgacgtgctggaggccgcgcgggccgacggagccggcgccctgcgcaccgcgctgtccatcaagatccccatgatccgcccgacgatcttcgtcgccctcgtcttcaccaccatcggctccctccagctgttcaccgaacccatggtcctgcgcaccttcaccggcgcggtcaccagcacctggacccccagcctctacatctacgacgcggccttcatcaggaacgactacgggcgcgccgccgccgcgtccattctgctcgccctcgcctcggccctgctctcggcgctggtgatgcggctgtcctcccggaggtcacgatga

SEQ ID NO: 116 - protein, 265 aa, Streptomyces roseosporus
VLIPIGYAFYLSLFADRLSGLGFDGYRQVLTGFDNYTDVLADPAARDSVANVARYAAIHIPVMFGGALLIALLLNSATVRLRQLWSLAVFLPYAVPGVIAGLIWGYLYSPGIGPLADVLPFDPFGESGVLPSIVNMATWQWTGYNVIIFYTALQTVPRDVLEAARADGAGALRTALSIKIPMIRPTIFVALVFTTIGSLQLFTEPMVLRTFTGAVTSTWTPSLYIYDAAFIRNDYGRAAAASILLALASALLSALVMRLSSRRSR

SEQ ID NO: 117 - DNA, 801 bp, Streptomyces roseosporus
gtgctcctgctcgccgccctctacagcgtcctcccgctggtgtggctggtcacctcggccaccaaatccgtcggcgacttctccgccaccagcgccttcgaactcgccgacttcaacctctggggcaatctgcgcgacctgttcgcccgggaggacggcgtcttcctccactggatacgcaactcgctgctgtacgcgggcgtcggagccgttctgggcgcgctgatctgcaccgcctgcggatacgccgtcgccaaactcgacttccccggacggcgcgccctgttcgccgtgaccctggccggggtcctcgtaccgcccaccgcgctcgctctgcccctgtacctgctcgcctcgaacctgcacctcgtgaacaccttctgggcggtgttcctcccgctgctcagcaaccccttcggcgtctacctcgcacgcaccttcgcggacgcagccgtccccgacgaggtcctggaggcggcacgactcgacggggcgggtgagttccgcatcttcctgaccgtcgccctgccgatgatgatgcccggcttcgtcaccatcgtgctgttccagttcgtcagcatctggaacaacttcttcctgccgctggtgatgctcaccgaccccgaactgttccccatgaccctcggcatctaccagtggaacacccgggccccgcagttccccgactacaaccccctggtcatcacgggatcgctgctcgccgtcgtaccgctgatcatcgccttcgtcgtcctgcagcgccagtggcgcagcggcctggccgcagggagcgtcaagtga

SEQ ID NO: 118 - protein, 266 aa, Streptomyces roseosporus
VLLLAALYSVLPLVWLVTSATKSVGDFSATSAFELADFNLWGNLRDLFAREDGVFLHWIRNSLLYAGVGAVLGALICTACGYAVAKLDFPGRRALFAVTLAGVLVPPTALALPLYLLASNLHLVNTFWAVFLPLLSNPFGVYLARTFADAAVPDEVLEAARLDGAGEFRIFLTVALPMMMPGFVTIVLFQFVSIWNNFFLPLVMLTDPELFPMTLGIYQWNTRAPQFPDYNPLVITGSLLAVVPLIIAFVVLQRQWRSGLAAGSVK

SEQ ID NO: 119 - DNA, 981 bp, Streptomyces roseosporus
atgaacgaccggacccggcacacccagttcgggcccgaggagttggaccggctgcacgccgtcgcctcgctcggacagccgctcggcgccgcggacctggactccggcgccgtccgcgcccgcctcgccgaggtggaggtgctgatcacctcctggggctgccccaccctcgaccaccgcgtcctgcgagccgccccgcgcctgcgtgccgtgctgcacgcggcgggatcggtacggggccatgtccccgacgccgtgttcgaccggggtctgctcgtcaccacggccgccgacagcaacgccgaacccgtcgcccagtacacgctcggcgcgatcctctgggcgttcaagaaggtgccgttcctcgccatggacgcccggcgctcccgcgaggactggagctacctgcaccgcaggggagagctcagcggccgtgaccgcaccgtcgtcctcgtcggcttctcccgcatcggccgccgcgtcgtcgacctcctgcgcaccctggacctggcccgggtcctggtcgtcgacccggtggcggaccccgccgaggtcgtggccgcgggagcccggccggcccagctcgcggaggcgctcccgcaggccgacgtactcagcctgcacgcaccggcactgcccgggacccggcacatgatcggagcggcacagctggccgtgctgccccccggcgccgtcctcgtcaacaccgcccgcggctccctcgtcgacaccgcggccctggaggcggcctgccgcgccggactgcacgccgtcctggacgtcaccgaccccgaacccctgcccgccgacagcccgttgtacgacctccacaacgtcgtcctcactccgcacatcgccgggtccctcggctccgagacccgcacgatggccggcgccgccctcaccgaactggagcgctacgccgccgggctgcccccactggccccggtcacccggcagtccctgaccacgcaggcctga

SEQ ID NO: 120 - protein, 326 aa, Streptomyces roseosporus
MNDRTRHTQFGPEELDRLHAVASLGQPLGAADLDSGAVRARLAEVEVLITSWGCPTLDHRVLRAAPRLRAVLHAAGSVRGHVPDAVFDRGLLVTTAADSNAEPVAQYTLGAILWAFKKVPFLAMDARRSREDWSYLHRRGELSGRDRTVVLVGFSRIGRRVVDLLRTLDLARVLVVDPVADPAEVVAAGARPAQLAEALPQADVLSLHAPALPGTRHMIGAAQLAVLPPGAVLVNTARGSLVDTAALEAACRAGLHAVLDVTDPEPLPADSPLYDLHNVVLTPHIAGSLGSETRTMAGAALTELERYAAGLPPLAPVTRQSLTTQA

SEQ ID NO: 121 - DNA, 2010 bp, Streptomyces roseosporus
atgaaccatcagcatcccggccgaaggaccgtactgcgggcgggcggcctggcaggcctcgcggccgccgccggcctcgccgcgaacccggcggccgcagcccccgccgccgcccggctcccgcgcatcgacgatctgggccccgctgtgagccagttctccctcatgagcgccgtactgaccggcgacaccgtccacatcggctcccgcaacatcgaacccgtccagatcatctccgtacacctgccgacccgaaaggtggtggcccgcaccgagctgtccaacggccactccatccaggcgctcgccgcggacgacagcggcaggtacctgtacgccggaatcctccagaaggcctccggcgaccggcccaacctcttccgctgggacctgagcacccccgacgagccggccgaacccctcggcgccatcggcgaccgcgacgtccgcgccctcgccgtggcacccgacggtgtcgtctacgcggtcggcggcggcagcagcggcgccccggccctgtgggagtacgaccccgagaccggcaggatcagcaacgtgggaaccccggatcccagggccaccctcgcacgggccgtcgcggcgacccgcacccacgccttcttcggcgcgggcaccaccttcaacggcggcggggacaccagcagggccgccctctacgcctacgaccggtccgccgggaccttcacctcgatcgcgcccccggagatgctgcgcgacccgagcatccgcgacctcgcggtcctcggggaccggctcgccgtcagcaccgccggttccacggaggacgcgaaggtcgccctcatggacctgaaggacctgtcctcgtacaagatcgcgacctcgatcggcaaggtcgccaagtcgttcaccatgaccggcgacaccgtccactacgccaacgaatccggtctgctcgcctacctgccgtccgcgaacaccgtgacccccgtcgcgtacgacggccccggactcggcgagatctggggcgtggacagccgcgcgggcaaggccgtcgtcacctcggccttcggcttcgtggccgagatcgacccggccaggaggaccgccgccgtcatcgatctcggcaccgccggcgcccccatggccccgcagacggtcatgggcatcgccgccggcggcggccacgtctacgtcggcggaaacgcgacgatcgcccgccacacccccggccgcgacacggtcgtcaagctccgcgcacccggcgaggccaaggacgccgtcgtcgtcaacggcatcctgtacaccggccagtacaactccgagggcatctggtgccacgacccccgcaccggaaagaccggccaggtggccgccttcccgtccgagcagaaccgcccgctggacgtcaccttcgacgaggacaccggtctcgtgctcgtcggagtgcagtccgacaccgagggcggcggcgccctctggacgtatcaccccaggaccggccggcaacggagcttcgccgacccggtcgacgaagcgcagtgcgtccggggcatcgcgagccggaacggcgtcgccttcctcggcggcgacaacaccgcccccaccggaccgcgcagcaccgtcgtcgcgttcgacccggtggccggccgggagctgtggcggatcgacccgcaacagacggcgggcaccgccgccctcgcggtacgcggacggcacctctacggactgtcccgcaagggcggcctcttcgtcatcgacatcccgcggcgcgaactgatccaccgcgcggacgtcacctcggtcagcaacgggttcgccgccctggtgaccaaccgcggtgtcgtctacggcgtctccgacaccaccgtcttccgcttccaccccaggaccttcgccgtctccgtcgtcgtccccgacatcgacggcggctggtacagcggcgcgcacatcaccaacgacgagcacggccggctctacaccatgcggggccgcaacctggtccggatcaccgaccgccccggccactga

SEQ ID NO: 122 - protein, 669 aa, Streptomyces roseosporus
MNHQHPGRRTVLRAGGLAGLAAAAGLAANPAAAAPAAARLPRIDDLGPAVSQFSLMSAVLTGDTVHIGSRNIEPVQIISVHLPTRKVVARTELSNGHSIQALAADDSGRYLYAGILQKASGDRPNLFRWDLSTPDEPAEPLGAIGDRDVRALAVAPDGVVYAVGGGSSGAPALWEYDPETGRISNVGTPDPRATLARAVAATRTHAFFGAGTTFNGGGDTSRAALYAYDRSAGTFTSIAPPEMLRDPSIRDLAVLGDRLAVSTAGSTEDAKVALMDLKDLSSYKIATSIGKVAKSFTMTGDTVHYANESGLLAYLPSANTVTPVAYDGPGLGEIWGVDSRAGKAVVTSAFGFVAEIDPARRTAAVIDLGTAGAPMAPQTVMGIAAGGGHVYVGGNATIARHTPGRDTVVKLRAPGEAKDAVVVNGILYTGQYNSEGIWCHDPRTGKTGQVAAFPSEQNRPLDVTFDEDTGLVLVGVQSDTEGGGALWTYHPRTGRQRSFADPVDEAQCVRGIASRNGVAFLGGDNTAPTGPRSTVVAFDPVAGRELWRIDPQQTAGTAALAVRGRHLYGLSRKGGLFVIDIPRRELIHRADVTSVSNGFAALVTNRGVVYGVSDTTVFRFHPRTFAVSVVVPDIDGGWYSGAHITNDEHGRLYTMRGRNLVRITDRPGH

SEQ ID NO: 123 - DNA, 879 bp, Streptomyces roseosporus
gtgtctccccccaccccgggcaccccgcgccatccccccacgccctcccagggagcttccatgaagaacgcgcacaagaggatctgcatcgccgtctgcctgggcgccgtcgccggcgccggttacgccacgaccgccaccgcgacgccggagaagtcggcccggccgcagcaggcgtccgacctgctcgacgtcgactacgagtccggggccctcgactccggcatccccgggctgaccacgacgcacgccaaggcctcggacgcctccacggtcgagagcggcggcgacgggagcgcacactcggtctcgcacaaggtgacgctgaacgacccggattacgtctccgacggcgcaccccgcagcgagagcgcgaacaacgagatcgagaagtcgctcatccacgtgggcgacgtgcaccgctacgagttcagcgtcatgctcaaggactgggagaccagcagcagcaaggcgggcgacatcatcttccagggcaagcacgcgggcgggaacaagccgtcgttctacctcatggcacagcgcaacgcgatcgcgttccgctccccgctcctcgacctgcaggcgccggtggtcgaggacttccgcccctatgtcgaccagtggatgcggttccgcatcgacgtccgctgggccgagagcaggaccggctactacaaggtgtccgtccggctcccgggagagaaggacttcaccctcaagaagacgtacaccgacgtcaacaccttccacccggagaaccccacggccttcggctacatcaagtggggcctgtaccgccccgcctcctcgacggaagcgggcgatcccgcgacccgcgtggtccggcacgacgacatccgggtgatcgacctcgggtga

SEQ ID NO: 124 - protein, 292 aa, Streptomyces roseosporus
VSPPTPGTPRHPPTPSQGASMKNAHKRICIAVCLGAVAGAGYATTATATPEKSARPQQASDLLDVDYESGALDSGIPGLTTTHAKASDASTVESGGDGSAHSVSHKVTLNDPDYVSDGAPRSESANNEIEKSLIHVGDVHRYEFSVMLKDWETSSSKAGDIIFQGKHAGGNKPSFYLMAQRNAIAFRSPLLDLQAPVVEDFRPYVDQWMRFRIDVRWAESRTGYYKVSVRLPGEKDFTLKKTYTDVNTFHPENPTAFGYIKWGLYRPASSTEAGDPATRVVRHDDIRVIDLG

SEQ ID NO: 125 - DNA, 1017 bp, Streptomyces roseosporus
tcacgtcgaccagaccaccttgccctggtgcacgatgaccaccttggcgtcgggcctcagcaccatctgggcgccgccaaagtcatgcgtcttggaagcccagatggcccggtcgtcgccgttgtggatgaccaggttgccgtcgggctggaagatcgcccggtggttctcgccgaaggtcatggcggcccagatcggcttgttccgctcgttgtagacgacgaggttgccgtcctgctgcatcgtcatgcggatgcggttggtggcccaggactggccgaccccgatggaactggtcgcggagaccgtctgggtgccccagtccggcttcggggccgccttgggcttcggcttcggtgaggccttcggcttctcggcgggggcgctcgtccggggtgcgggcgaaggggccacgggtgcgggagcggccttcggcggggtggtcttcttctgttccgtcggggacggcgtgggcttcaccgccacgtagtcgtccagggccgccggggccgactcggggttgaggaccgtgtcggcgctcccggccaccggtgccgtaccgctgttacggggcttctcgtcgttcgcgctgcccatcagcagcacgggtatcgcgaccagtgcggcgccgacgaacgccgcccccgccaggaccggtgcgcgggggcggcccctgtcggcagcggtgagggtcttggtgtccggcttcgcggcgacggccgctgccagggcgatggcctccgtgcggccttcgggtgcttccgtggttgtggttgtggccggggcctgggtctgggctttttcggtaccggtcgttgcggcgggctcggtcgggggctccccggtgccggccgtcgtggcggcctcgctccggggcttccgcgcctcggccggggcggcggacggcggggcggcggggccggactcctccgtggtgggcggcagggaagcggtgccggacttctccgtggctgccgccgcggactcggtgccgggggcggggggctcggggggcat

SEQ ID NO: 126 - protein, 338 aa, Streptomyces roseosporus
MPPEPPAPGTESAAAATEKSGTASLPPTTEESGPAAPPSAAPAEARKPRSEAATTAGTGEPPTEPAATTGTEKAQTQAPATTTTTEAPEGRTEAIALAAAVAAKPDTKTLTAADRGRPRAPVLAGAAFVGAALVAIPVLLMGSANDEKPRNSGTAPVAGSADTVLNPESAPAALDDYVAVKPTPSPTEQKKTTPPKAAPAPVAPSPAPRTSAPAEKPKASPKPKPKAAPKPDWGTQTVSATSSIGVGQSWATNRIRMTMQQDGNLVVYNERNKPIWAAMTFGENHRAIFQPDGNLVIHNGDDRAIWASKTHDFGGAQMVLRPDAKVVIVHQGKVVWST

SEQ ID NO: 127 - DNA, 624 bp, Streptomyces roseosporus
gtggatgcctccctcgtgccggaagccgtgaaggacgccgcacgccgtgcgcccggccactgggtcggcatcgtcgatccggagtggacgcaggcgcggacgcccccggagtgggccgtgctgggggagtggcagtcggacgagagcgggagcgtgggcgagtaccgcgccaaccccggctaccgtccctccgcccgggtcctcggctggccggagcccaccgatccggtggacgcggccgcccagcgggccgccacggggtacggcacggtggacgaggcgctggccgcactcgcggaggcggacgtcaccgtcgtacgcgggcccgacggcgggccactcctggccgcggggcgggacggggcgctggtggcgctcctgttcacctcgcccacccacgcgttcatgtccgcggcacttcaccatgacaccgtgtccgcccgggagctggccgggtcgctggcgcagaccggcgtcctgctgtcggtcaacgccggtgccgcggctccgctgctcgttcccaccgacagccttgccggtgccgtgagttccggcccggagaccgcggccgacggccccgcgccgaccgaaccctggccccacaccacagggagaaccccgtga

SEQ ID NO: 128 - protein, 207 aa, Streptomyces roseosporus
VDASLVPEAVKDAARRAPGHWVGIVDPEWTQARTPPEWAVLGEWQSDESGSVGEYRANPGYRPSARVLGWPEPTDPVDAAAQRAATGYGTVDEALAALAEADVTVVRGPDGGPLLAAGRDGALVALLFTSPTHAFMSAALHHDTVSARELAGSLAQTGVLLSVNAGAAAPLLVPTDSLAGAVSSGPETAADGPAPTEPWPHTTGRTP

SEQ ID NO: 129 - DNA, 1176 bp, Streptomyces roseosporus
gtgacgcgttcgtcgtcccagcagccccccgcctccgcttccgctcccgcacaggcgaagaccgaagccgcgccggccgaggccaccgaggcggagaaggtcaaggaggtcgaggagggggagaaggccgagcagggcgagcgctccgaggcccagtcctccgagcgccagtccccccaggtccaggcccaagcccccggcgccggggcggaaaaccccaaggcgcccaccgcctccgagaccgacccggaccccggcgcctccgccgccgcccagagtcggctccccgccctcgtacggaccatgaccgccaccgccatcgggaagccgcagcaggaggcggggcccgtggggcggccgggcaaggccgcgctcgcgggggcggcggtcgtgggcgcgctgctcgtgtcggtgcccttcctcgtgctcgccgggaacaacgacgacgggcccgagcggacgaaggccgccggggccgggaccgtcctcgacgggagcggaccggaggcgccgggcgagttcgccgtcaccgcgcccgaggccggcgcgcccgccgaggacagggagaagagggagaaggacgaggcgaagccggagaagggcggcaatcccgttccggccatccctccggggggcggcggcaaagcggagacgaaggaggacaacgcccccaacgacccgccgaagaaggccgattcgtccaaggggaagtccaaggagcagcccgaggcgggcagcggcggcggcaggaaccagccggccaaggcccagcccgccgtcacgttcagcgggcccgtctccttccgcagccacctctccggccgctgcctcgacgtccccgggcacaacttcaacgacggccagccgctgttcatgtgggactgcaacggcgccgacgcccagaagtggcgcttcggctcggacggcacgatccgggccagggacaagtgcctggacgtggccaacgccgacttcgccaacggctcccggatccagctcgcctggtgcaacggctccgccgcccagaagttcaccctgaacggcgcccacgacctggtcaacaccgtcgtcggcaagtgcgtcgacatcccgaaccacagcaagggccggggcccggagacctacctgatcctgtgggagtgcacggggctcgacaaccagaagtggagcacctga

SEQ ID NO: 130 - protein, 391 aa, Streptomyces roseosporus
VTRSSSQQPPASASAPAQAKTEAAPAEATEAEKVKEVEEGEKAEQGERSEAQSSERQSPQVQAQAPGAGAENPKAPTASETDPDPGASAAAQSRLPALVRTMTATAIGKPQQEAGPVGRPGKAALAGAAVVGALLVSVPFLVLAGNNDDGPERTKAAGAGTVLDGSGPEAPGEFAVTAPEAGAPAEDREKREKDEAKPEKGGNPVPAIPPGGGGKAETKEDNAPNDPPKKADSSKGKSKEQPEAGSGGGRNQPAKAQPAVTFSGPVSFRSHLSGRCLDVPGHNFNDGQPLFMWDCNGADAQKWRFGSDGTIRARDKCLDVANADFANGSRIQLAWCNGSAAQKFTLNGAHDLVNTVVGKCVDIPNHSKGRGPETYLILWECTGLDNQKWST

SEQ ID NO: 131 - DNA, 3312 bp, Streptomyces roseosporus
gtgtcgcgccaggtactgacggtcggccccgcggaccgcttttccacgatcggtgaggcgctcgccgccgcccgtaccggtgcgctcatcagcgtccggcccgggacgtacgcggagaacctggtgatccacacccgggtgaccctcaccgcagccgaggggcggggcacggtggagatccggccgcgttcgggcagcgtcgtcgcgctgcgcgccgacgccgtcatgctctccgaactcaccctgcgcggcggggactccgagctgcccgccgtcgacgtacggcgcgggcaggccgcgttcgacgggtgcgagatcgtcggcgcggcctggaccgcgatgctggccggcgggaccgggtccctcgcgctgcgggactgccgggtgagcaacccgcggggcgcgggcatcgtggtcacctccgccacccccaccaccgtcgagtcctgcacgctcgaacacctcggcaccagcggcatcgtcctcgccgagcagggcgaggcgcgcgtccgcgactgcacggtgcggggcgcccggggcaacgggctgctggccaacggcgagacccggggcaccgtcgaggactgcgacatctcctccaccgacaagccctccatcgccctggagggggactccgccgtctccgtcgtccggaccgtggtgcatgacaccagcaccggcgtgcatctgagcagcgcgggccgcaccaccctggaggacgtccgcgtcaccggcgcctccggcaacgggatcgtcctcgccgtgggcaccgaccccgtactgcgccgctgccgtgtctcgcgcgcacgggggcacgggctgttcgtcaccgaccgggcgcgcggcaccttcgaggactgctgggtggacggggcacagggcgccgcgctgcgggtcgccggggcctcctccccggcgctgaccggactgaccgtccgcgactgcgaaggggccgggctgcttctggaggaggacgcggcgcccgagctggaccgcctggaggtcatcggctcctcgcccgccgtcgctctgcagggcggcgccaacccgctgctgcgccgggcccggctggtcgaacccgccggtgacggcatcgcggccaccaaggacgcccggggccgcgcagaggactgcgagatcgtccgcccgaagggcgccggtgtacgggtggcctccggctccaccctctacctggccggtggcggggtctccgacacggccaccaacggcctggtcgtggaggacggcggcaatgtcaccgtccgtgacttccgcgtcgaaatatcgggtgaggagggtgtggtcgtcgccgccggtggtgaactgaccgccaaccgcaccaccgtccacgcccccaagggacacggtttcctcctccgcgagggcgctctcgcctcgctcagcggctgcgaggccaacgggggcgcccaggacggcttccgggtcgagtccaccgccccggtctcgctcgtcaactgcaccgcccgcgagaacgagggcggcggcctggtgcagaccgcgcccggcgaacggctcgccgtggacggcctgaacagcgtcgggaacggcaagcgcgacgcctggggcagcggcagtgccgagaacaccgacccggccgggtccggcgccgccgacgcgcccccgccggaccgtgcggacggcccgctcggcgccctcaacgcgctgatcggcctggagaacgtcaagcagcaggtccgcaccctcgtcaacctcacccagctcgcccagcgacgcgagcaactcggcatgcccgcaccgccgatgagcagacacctgatcttcgccggaccgcccggcaccggtaagaccaccgtcgcccgcctctacggggcgatcctggccgagctgggctcgctgcgcagtggacacctggtcgaggtctcccgcgcggacctggtcgcccaagtcgtcggcggcactgccatcaagacctccgagaccttccaacgagcgctgggaggggtcctgttcatcgacgaggcgtacaccctcaccgccgacagcggcaacggcggagccgacttcggccgcgaggccgtggacaccctgctcaagctcatggaggaccaccgcgacgacgtggtcgtggtcgccgccggatactcccgcgagatggaatccttcctcagctccaacccgggcctcgcgtcccgcttctcgcggaccgtcgagttcgagaactactccgtggacgacctggtcgcgatcatggagagcatgtgcacccagcaccagtacgagctgggggagggcacggcccaggcgctcgccgcccacttcggggccatggaccgggacgccggattcggcaacggccgtgccgcacgcggggtgttcgaggagatggtggaccggcaggcgatccggctctccgcccaggcccaggtcagcgagaacgatctgcggctcctgctccccgaggacgtctccgccaccgccgccgcctcggccgccgagaccgccgtaccggccgacgacccgctcacccgcctgggcgacatgatcggactggccggggtgaagcgtgaggtcgccgatctggtcaacctcatcaccaccgcccgccaccgcgccgccgccgggctgcccgtccccaccctcagcaaccacctggtcttcaccggcccgcccggcaccggcaagaccaccgtcgcccggctctacggcgaggtgctcacccagctcggcgtgctggagcgcggccagctgatcgaggccgcgcgcgccgacctcgtcggccgctacataggccacaccgcccagttgacccgtgaggtcttcgaaaaggcccgcggcggcgtgctgttcatcgacgaggcctacaccctcaccccgcgcggcggcggcgccgacttcgggcaggaggcggtggacaccctgctgaagctgatggaggaccaccgcgacgaggtcgtcgtcatcgtcgccggatacaccgacgagatggaacgcttcctcgcctccaaccccggcctctcctcccgcttcccacgccggatcgccttcgccgactactcctccgaggaactggtcaccatcgtgcgcgcccaggccgccgccatggggtacgagtgcggccccggcaccggaccgctgctcaaggagcacttcgacgcggtaccccgcgaccggtccttcggcaacgcccggctggcccgccaggtcgtcgagtcgatggtcacccgccaggcgggcaggatcagttcgctggccgcgcccaccctggacgacctgcgcatcctcctcccggcggacgtcacggccgcggccccgaaggcggtgcagcagtga

SEQ ID NO: 132 - protein, 1103 aa, Streptomyces roseosporus
VSRQVLTVGPADRFSTIGEALAAARTGALISVRPGTYAENLVIHTRVTLTAAEGRGTVEIRPRSGSVVALRADAVMLSELTLRGGDSELPAVDVRRGQAAFDGCEIVGAAWTAMLAGGTGSLALRDCRVSNPRGAGIVVTSATPTTVESCTLEHLGTSGIVLAEQGEARVRDCTVRGARGNGLLANGETRGTVEDCDISSTDKPSIALEGDSAVSVVRTVVHDTSTGVHLSSAGRTTLEDVRVTGASGNGIVLAVGTDPVLRRCRVSRARGHGLFVTDRARGTFEDCWVDGAQGAALRVAGASSPALTGLTVRDCEGAGLLLEEDAAPELDRLEVIGSSPAVALQGGANPLLRRARLVEPAGDGIAATKDARGRAEDCEIVRPKGAGVRVASGSTLYLAGGGVSDTATNGLVVEDGGNVTVRDFRVEISGEEGVVVAAGGELTANRTTVHAPKGHGFLLREGALASLSGCEANGGAQDGFRVESTAPVSLVNCTARENEGGGLVQTAPGERLAVDGLNSVGNGKRDAWGSGSAENTDPAGSGAADAPPPDRADGPLGALNALIGLENVKQQVRTLVNLTQLAQRREQLGMPAPPMSRHLIFAGPPGTGKTTVARLYGAILAELGSLRSGHLVEVSRADLVAQVVGGTAIKTSETFQRALGGVLFIDEAYTLTADSGNGGADFGREAVDTLLKLMEDHRDDVVVVAAGYSREMESFLSSNPGLASRFSRTVEFENYSVDDLVAIMESMCTQHQYELGEGTAQALAAHFGAMDRDAGFGNGRAARGVFEEMVDRQAIRLSAQAQVSENDLRLLLPEDVSATAAASAAETAVPADDPLTRLGDMIGLAGVKREVADLVNLITTARHRAAAGLPVPTLSNHLVFTGPPGTGKTTVARLYGEVLTQLGVLERGQLIEAARADLVGRYIGHTAQLTREVFEKARGGVLFIDEAYTLTPRGGGADFGQEAVDTLLKLMEDHRDEVVVIVAGYTDEMERFLASNPGLSSRFPRRIAFADYSSEELVTIVRAQAAAMGYECGPGTGPLLKEHFDAVPRDRSFGNARLARQVVESMVTRQAGRISSLAAPTLDDLRILLPADVTAAAPKAVQQ

SEQ ID NO: 133 - DNA, 1269 bp, Streptomyces roseosporus
gtgaggccgcccgcgcgacgggcgaccgggaggccccgagcaggccggctgttgtacggggtctcgctcgccgccgccctggtggtgccggtggccgtacccgcccaggcggcacctgtcacccttacaccggccgctgacggggccaagggacaggagctgcccgggatgcccaccgcgctcgacgcgcgggccgaggccgtcgcctgcacccccgcctccaaggagcaggcgaagaagcaggactggtcgcgccagcgcctcgacctggaccggctgcaccggcacaccaccgggtcgggggtgaccgtcgcgctgatctccaccggcgtcgaccccggggccgagggactcgacggccgcgtgaccgcccagggccaggccgccgacgactgcgtcggacaggggacgttcctggccgggctgatcgccgggaccggcggccccaccccgcgcctcgccggggtcgccccgggcgcgaagatcctcgccctgcgcggcaccgaccggcgcgggcagccggaccccgcgctcgtcacggcggcggtacgggccgccaccacggccgaggccgacgtcatcgcggtcgcggtggcccttccccgtaaggacaccgcgctcacccgggccgtcgccgaggcccgcaaggcgggggcggtggtggtcgcgtcggccaccccggagccgccgtcgcgcggctcggccgacgagatcccctcgcgtacctactggcccgccggtgagcccggcgtcctcgcggtcgccgacatgctgcccgccggggcccggccggacgccgccctccccaccgagggcatcgatctggccgccccgggcgccggagtggtctccggcgggccgcgcggcaaggggcactacctcggcggcggggtcgcggtggccaccgcgtacgcggccggggccgtagccgctgtccgcgccacccaccccgaggcgacggccgacgcggtggcccgtcggctgaccgccaccgcgtacccggccgacatcccccagctggacgtctacgccgccgtcaccacggtcctcggcgacgcgggcgcgccggtcggcggtgcggagcgggccgccgaacccgtggccgtacgcgacacctccgacaccgaccgcgccaccggccgggccgtcctcttcgtcctcctcggctcggcgggcgtcctctccctcctctgggccggtttcgccgtcacccgggcccgcgcccggggctggcgaccggcgggggcgggcaccccggaccagggctga

SEQ ID NO: 134 - protein, 422 aa, Streptomyces roseosporus
VRPPARRATGRPRAGRLLYGVSLAAALVVPVAVPAQAAPVTLTPAADGAKGQELPGMPTALDARAEAVACTPASKEQAKKQDWSRQRLDLDRLHRHTTGSGVTVALISTGVDPGAEGLDGRVTAQGQAADDCVGQGTFLAGLIAGTGGPTPRLAGVAPGAKILALRGTDRRGQPDPALVTAAVRAATTAEADVIAVAVALPRKDTALTRAVAEARKAGAVVVASATPEPPSRGSADEIPSRTYWPAGEPGVLAVADMLPAGARPDAALPTEGIDLAAPGAGVVSGGPRGKGHYLGGGVAVATAYAAGAVAAVRATHPEATADAVARRLTATAYPADIPQLDVYAAVTTVLGDAGAPVGGAERAAEPVAVRDTSDTDRATGRAVLFVLLGSAGVLSLLWAGFAVTRARARGWRPAGAGTPDQG

SEQ ID NO: 135 - DNA, 3363 bp, Streptomyces roseosporus
ctattccaccagggccgtctgcaccagccgcggcttgcggcgctggatgtgcagggcccggcccggcggcaggttcagcggcttcgcgttgccgaacaggcggccctccgtgggcgggcaggagagcaggaccgccgggttgttggcctcgtccaggcggcggatcaggccgtcgctcagaccgcgccccgctcccatcgcgctgcgggcgacgaccaggtgcaggcccatctcgtagccgagggtcagatgctcgaagagcggctcgaaggggctctggaacgagttgcccgacaccatgtcgtagtcgtcgaccaggacgaacaggcgcgggcccgtccaccagtcgcaccggcgcatccgggcgggtgagatgtcggccccgggcacccgggtcttcatcgcgcgggccgcgccctcgatggtctcgttgaggttgtcgagggagatgacatgcccgatgcggtactcctcggggatggcgtcgaccagggtgcggcggtagtccaccgcgatgatcttcgcctcctcgggggcgtaccgggcggtgatgccctgcgtgatcaggcgcagcagattggtcttgccgctctcggtgtcgccgaccgcgatcaggtgcggcgtccggctgaagtcgtgccagaccggctccagcgcgtcctggtcgagaccgagcacgaggcgcatgccgccgccctccgtggcctcgggggaggggagttcggagaccggcagccggtgcgggagcatccgcacctgcggggcggcgggaccggaccagtgccgggagatctcgccgacgaggtgggccacgccctcgcccagatcctccagggagccgctgccgtccagccggggcaggcccgcgaggaagtgcatcttgctgtcggcggtgatgccccggccgccggtgcgcggcaccgaacgggccttgcgggtgtcgatctcggagtccatcggatcacccatccgcagttcgaggcgggtggcggcctggtcgcggacctgcgcggacagctccacccagcgggtcgtggtgatgagcagatggatgccgtaattgaggccccgggcggcgagttcgttgaacttcgggatcaggccgtcgtagtcctggcggaccgtggaccagccgtcgaccaccatgaagacatcgccgaacggctcgtcggggaactccccggcggcgcggcgccgccggtaggactgcatggagtccagcgtgtggtctacgaagaactgctcacggcgggccagcagcgtcatcacctcggccaccgtccggtgcacccgctccgggttgagccgcgccgcgactccgccgacgtgcgggagcgcggcgagctgggagaggccgccgccgccgaagtccaggcagtagaactgcacttcggccggggtgtgggtgagcgcgagggcggcgatgagggtccgggcgaccgtggacttgccgctctgcgaaccgcccgcgacggcgacatggccgcccgccccggacaggtccacgaccagcggatcgcgccgctgctcgaacggcttgtccaccaggccgaccggcacccgcagcttccccgtgcccgcccagcttgccgccatcagcccccgctccttgtccggcgtgatcccgggcagcagcgcgtccagcggggacggctcgtccagcggcggcagccacacctggtgggcgtccggcccggagccgcgcagccggtccagcgccacatcgagcagcgcctcctcgtcctcggcctcctccgtctccggctccgggtcgggcggtgtctccagggtgcgcggcaccacccatccgctggtccacggcaccacctggctcgccacccgggcctgcaccaccgcaccggtcctgcgccggtacgtccccgaggagtacgcggcacggaaccgggtcagggcctccaccccggacttcagatagccgctgccgggcgcggcgggcaactcgtaggcatcgggaacgccgagcacgccacggctctccatcgcggagaaggtccgcagcccgatgcggtacgacaggtggctctccagctggtgcatacgcccctcgtccaggcgctgtgaagcgagcagcagatggacgcccagggaccggccgaggcggccgatcatcacgaacagctccatgaactcccggtgggtggagagcagttcgctgaactcgtcgaccaccacgaagaggctgggcagcggtgccaggtcggcgccggcggcgcgggcccgctcgtactccagcgccgaggtgtagttgcccgccgcgcgcaacagctcctggcggcggatgagttcgccgtgcagggcgtcctgcatgcgttccaccagggcgacttcgtcggccaggttggtgatcacggcggaggtgtgcgggagttcctccaggccgaggaaggtggcgccgcccttgaagtcgaccaggacgaagttgagggtctcggaggagttggtcagggcgagaccgaggacgagggtgcgcagcagctcgctcttgccggagccggtggccccgatcagcatgccgtgcgggcccatgccgccctgcgcggactccttgatgtcgagctcgaccgggcggccgtccaccccgaccgcgatcggcacccgcagccggccggagccggagtgccgggcgaacagggtccccgggtcgtgccggtgcagatcggggatgccgagcagggtggtcagctcgacatcggtgtccagcggctgcgcgatatccgtgccgaggctcatccggcgcggggtgagcagccgggccagcgcctccgcgccgagcgggccgagccggtcggggcggccgagcggcaccgtgcgctccttgcggctgcggtcggtgcgcaccaggttcacctggccgggccccacggtgaggcgcagcgtgttgcggccgggccgccagcgcagtgccccggacacgtccaggatcagggcgttgcggtagccgtggccctcccagcggtggccctccgggacgctgacgccgtccaggacgacgacggtgtacggctcgtcgcggccgggccgggcgtccgggtcgaacccggggcgctcggcgaactcggcgccgagcagatcgtccagctcggtgaggtctgcggtgatccggcgggcctgccccgccccgtcctcctcgtgcggatccagcacgtgcggcagccacttgacccactcccagtcggcccgccgttcgtcgctgacgcagaacgcgatccacagctcctcgggcgcgtggaacaccgccaactgcccgagcatcgcccgcaccagggcccgtacggcgtcgtgctccgggggatgagcgccgggcgtggcaccgtccggcgcctcctccggacgcagcaggat

SEQ ID NO: 136 - protein, 1120 aa, Streptomyces roseosporus
ILLRPEEAPDGATPGAHPPEHDAVRALVRAMLGQLAVFHAPEELWIAFCVSDERRADWEWVKWLPHVLDPHEEDGAGQARRITADLTELDDLLGAEFAERPGFDPDARPGRDEPYTVVVLDGVSVPEGHRWEGHGYRNALILDVSGALRWRPGRNTLRLTVGPGQVNLVRTDRSRKERTVPLGRPDRLGPLGAEALARLLTPRRMSLGTDIAQPLDTDVELTTLLGIPDLHRHDPGTLFARHSGSGRLRVPIAVGVDGRPVELDIKESAQGGMGPHGMLIGATGSGKSELLRTLVLGLALTNSSETLNFVLVDFKGGATFLGLEELPHTSAVITNLADEVALVERMQDALHGELIRRQELLRAAGNYTSALEYERARAAGADLAPLPSLFVVVDEFSELLSTHREFMELFVMIGRLGRSLGVHLLLASQRLDEGRMHQLESHLSYRIGLRTFSAMESRGVLGVPDAYELPAAPGSGYLKSGVEALTRFRAAYSSGTYRRRTGAVVQARVASQVVPWTSGWVVPRTLETPPDPEPETEEAEDEEALLDVALDRLRGSGPDAHQVWLPPLDEPSPLDALLPGITPDKERGLMAASWAGTGKLRVPVGLVDKPFEQRRDPLVVDLSGAGGHVAVAGGSQSGKSTVARTLIAALALTHTPAEVQFYCLDFGGGGLSQLAALPHVGGVAARLNPERVHRTVAEVMTLLARREQFFVDHTLDSMQSYRRRRAAGEFPDEPFGDVFMVVDGWSTVRQDYDGLIPKFNELAARGLNYGIHLLITTTRWVELSAQVRDQAATRLELRMGDPMDSEIDTRKARSVPRTGGRGITADSKMHFLAGLPRLDGSGSLEDLGEGVAHLVGEISRHWSGPAAPQVRMLPHRLPVSELPSPEATEGGGMRLVLGLDQDALEPVWHDFSRTPHLIAVGDTESGKTNLLRLITQGITARYAPEEAKIIAVDYRRTLVDAIPEEYRIGHVISLDNLNETIEGAARAMKTRVPGADISPARMRRCDWWTGPRLFVLVDDYDMVSGNSFQSPFEPLFEHLTLGYEMGLHLVVARSAMGAGRGLSDGLIRRLDEANNPAVLLSCPPTEGRLFGNAKPLNLPPGRALHIQRRKPRLVQTALVE

SEQ ID NO: 137 - DNA, 21 bp, Streptomyces roseosporus
gctcgtccccctccccgcact

SEQ ID NO: 138 - DNA, 22 bp, Streptomyces roseosporus
cgaacaggtgggctttgagtgg

SEQ ID NO: 139 - DNA, 20 bp, Streptomyces roseosporus
cttcgtgaacaccctcgtcc

SEQ ID NO: 140 - DNA, 20 bp, Streptomyces roseosporus
gttcgtcgaggtccagtacg

SEQ ID NO: 141 - DNA, 20 bp, Streptomyces roseosporus
gcaccagcgtgtgcggatcg

SEQ ID NO: 142 - DNA, 20 bp, Streptomyces roseosporus
cacgtacgtgacgatcctcg

SEQ ID NO: 143 - DNA, 20 bp, Streptomyces roseosporus
cgtactggacctcgacgacc

SEQ ID NO: 144 - DNA, 20 bp, Streptomyces roseosporus
cgaccagcgtgtgtacgtcc

SEQ ID NO: 145 - DNA, 20 bp, Streptomyces roseosporus
agtcctcagccatctcctcg

SEQ ID NO: 146 - DNA, 19 bp, Streptomyces roseosporus
gagaccgtcggcgtggacg

SEQ ID NO: 147 - DNA, 21 bp, Streptomyces roseosporus
agggccacaccgtcgaactcc

SEQ ID NO: 148 - DNA, 20 bp, Streptomyces roseosporus
atcgtcgccgactacctcgc

SEQ ID NO: 149 - DNA, 19 bp, Streptomyces roseosporus
ggcagctacctcgtactgg

SEQ ID NO: 150 - DNA, 21 bp, Streptomyces roseosporus
tgtacgacagcggcgtcgaac

SEQ ID NO: 151 - DNA, 20 bp, Streptomyces roseosporus
cgattctcggcatgttcgcc

SEQ ID NO: 152 - DNA, 20 bp, Streptomyces roseosporus
tcgtctcctacatgacctcg

SEQ ID NO: 153 - DNA, 20 bp, Streptomyces roseosporus
ttcacggaaaccgaacgtcg

SEQ ID NO: 154 - DNA, 20 bp, Streptomyces roseosporus
ggttcaggccgcagccaacg

SEQ ID NO: 155 - DNA, 21 bp, Streptomyces roseosporus
cgctgaccttggtcagaagcc

SEQ ID NO: 156 - DNA, 28 bp, Artificial Sequence
  Description of Artificial Sequence: Primer
gcgaagcttctggtggcgcatcacctgg

SEQ ID NO: 157 - DNA, 29 bp, Artificial Sequence
  Description of Artificial Sequence: Primer
gctctagatggaagtatgtcctccatcgc

SEQ ID NO: 158 - DNA, 23 bp, Artificial Sequence
  Description of Artificial Sequence: Primer
cggatcccgccggcacctgaccc

SEQ ID NO: 159 - DNA, 28 bp, Artificial Sequence
  Description of Artificial Sequence: Primer
ccgaattccgcctccgagtacatcgagg

SEQ ID NO: 160 - DNA, 23 bp, Artificial Sequence
  Description of Artificial Sequence: Primer
acsswsggsgtssccttcatgaa

SEQ ID NO: 161 - DNA, 20 bp, Artificial Sequence
  Description of Artificial Sequence: Primer
atggtgttcgagaactaycc

SEQ ID NO: 162 - DNA, 25 bp, Artificial Sequence
  Description of Artificial Sequence: Primer
scsctscaggagggshtsststtcc

SEQ ID NO: 163 - DNA, 23 bp, Artificial Sequence
  Description of Artificial Sequence: Primer
ccgaasacsacgtcgtcscgscc

SEQ ID NO: 164 - protein, 2418 aa, Streptomyces coelicolor
MAKSGLEDILPLSPLQEGMLFHNLFDEEELDAYNVQVFIDLEGGTDPERLRRAGQALLERHANLRAAFRHEGLKRPVQLIPRRVVLPWGEEDLSGVAEPEREAAAERVAERDRWTRFDLSRPPLIRFTLVRLGPARHRLLLTLHHILADGWSMPILLRELMTLYTVHGDGTALPRVRPYRDYLGWLGGRDRDAARQAWTEAFAGLDAPSIVAPGRGALTAAPERIDFSEDEAASAALTRFARSNGLTVNTVIQGCWGLVLSHLTGRDDVVFGVTVSGRPPELPGIDTMVGLFMNTLPLRVRLRPAETLTGFLRRLQGEQARLIDHQWVGLAEIQRWAGSGELFDTAMVFENYPLNSSRGRPPGAAPDADLPTVLGVRSKDQMHYPLGLLALPRETLRFSLGYLPQVFDPARVEAVIAAFRRALRTVLDAPDTRVGAVALLDPEVRGTVLEKWSGSDDVRPAERFTDLFEEQVARTPGKTALIAPDGRLTYAELDAAANRLARRLVELGVGPERHVAVAVGRRTELVVGMLAVLKAGGAYVPVDPEYPPDRIRHMIQDADPALVLTTSDVDDRIGEECCGPLTFVMDDPNTGTSLGRHSGTALTDADRAAPLLPGHPAYVIYTSGTTGRPKGVVVEHRALSAFVRHCRSSQAPDISGLSVMQASASFDQSVGSLHAPLISGGCVRLTDLRALAETAGSEPGFHRATFMKGTPSHLALLATMPPEVAPSGTLTLGGEELRGEILAPWREAAGDVTVVNVYGPTEATGHCLEHWIAPDRTVEPGPVPIGTPHEGVRVYVLDSALRPVAPGLDGEVYLAGVQLARGYLGRGGLTAERFTADPFGAPGSRMYRTGDVAHWNEAGELVFAGRADRQVKLRGYRIELGEIEAAVAGGPGVRQAAVVLREDRPGDQRLVAYVVPDPGHWDEAAARARLALSLPDFMMPSAFVALDALPLSPNGKLDRAALPAPTYTGRTAGRAPRTPAEEILCDLYAEVLSLPGVTVDDDFFDLGGHSLLATRLVSRVRTTLGAELSIRQFFEAPTPAALAVVLAGAGRARAALTARPRPERLPLSYAQQRLWFLHLLEGPSPTYNIPTVLRLSGPLRPDALRAALLDVVGRHESLRTTFTEDERGARQVVHPADGVRPVFETAESTEADYEADLARAARHAFDLGAEIPVRARLLRLSEREHVLLLLVHHIASDAWSRGPLAQDLTAAYTARCAGDAPAWQPLPVQYADYALWQQEILGDDTDPDTLAGRQLAYWKQQLAGLPERLDLPTDRPRPATADHTGDRVEFALPADLHTRLTELARATDTTLYMVLQAALATLLTRHGAGEDIPIGTPVAGRTDDATDHLVGFFVNTLVLRTDTSGNPTFRDLLTRVRDTDLTAYTHQDLPFERLVEALNPTRSLTHHPLFQVVLSLRSTAPRRADGEGAPALPGGLRVSGTGGAAATAAKVDLGFSVTERRAADHTPDGVAGVLDFRTDLFDRGTAQGLVDRLVRVLADAAAHPDRPLSRIDVLGPRERHRVVEEWNATAKGLAPATLPELFERHVRERPGAEAVVAGDTSLSYAELNARANRLARLLVARGAGPERLVALALPRSAELPVAVLAVAKAGAAYLPLDPAHPAERIAGTLDDAAPVALLTTAAVAAGLPDTDVPRLLLDEEPAAGGGEDAADLTDADRLAPLLPGHPAYVIYTSGTTGRPKGVTVTHSGLPALLDIFTSQLDVVPGSRVLHHLSPAFDGGFWELAMGLLTGAALVVVEPGTVPGPALAALAVRHRVTHAAITPAVLQLIPEGALPAGTTLVVAAETCPPELVARWSAGRLMRNSYGPTETTVCATMSAPLAGAAVPPIGRPIADTAGYVLDDALQPVPPGVPGELYVRGPGLARGYLGRPSLTAGRFVACPFGPAGGVMYRTGDLVRHRADGDLEYLGRTDTQVKLRGMRVEPAEIEAVTAGLPGVAQAAVLVREDTPGDRRLVGYVVPDAGASVDPGALRQALRGSLPEYMVPAALVVLDALPLTTNGKLDHRALPAPEYRTVEGRSPRTPREEALCRLFAEVLGLELVGLDDGFFDLGGHSLLAIRLVERVRAELGEELGVRDLFAAPTVADLAVRLAARGGREPMERLLPLRAAGTARPVFCVHPGSGMSWCYSGLVRHLPPGIPVYGLQAAGLDGDGPLPATLQEMAAEYADLVRQTQPEGPYRLLGWSLGGNVAFAMARELRARGQEVELLAFLDAYPRRAGAGPEAPLAEVFAHNLRDAGFDVAEEELTGGRFPTARYRAFLNAAGDPMGRLDEAELAAVLEVFMNNAALMRGHTPGTYDGDVLVLAAERADGDKLARRGAESWRPHVRGRIERVGVDADHLGLVQSDAALAVIGRALAGRLDPATGHAASAAVPETEGVTAMNPSPEPAPSPESLDSTEVAN

SEQ ID NO: 165 - protein, 273 aa, Streptomyces coelicolor
MPVLTVNGIRINYYDDAPPAGAQNAPAVLLVMGSGGSGRAWHLHQVPALVAAGFRVISFDNRGIAPSEECPGGFGIDDLVADTAALVEELRLGPCRVAGISMGAHIAQELALSRPDLVDRLVLMATRARPDALREALCRAEMELYDQGIRLPAAYEAVVQAMQNLSPRTLDNDVQARDWLDVLELTRRSGAGYRAQLGVRVDGDRREAYRGIRAATRVVAFQDDLIAPPHLGREVADAIPGAEYELVPDCGHYGYLESPDAVNKSLVEFLRRN

SEQ ID NO: 166 - protein, 5 aa, Artificial Sequence
  Description of Artificial Sequence: Illustrative thioesterase motif
GWSFG

SEQ ID NO: 167 - protein, 5 aa, Artificial Sequence
  Description of Artificial Sequence: Illustrative thioesterase motif
GTSLG

SEQ ID NO: 168 - protein, 6 aa, Artificial Sequence
  MOD_RES (4): Orn
  Description of Artificial Sequence: Illustrative peptide
WNDXGT

SEQ ID NO: 169 - protein, 8 aa, Artificial Sequence
  Description of Artificial Sequence: Illustrative peptide
DLTKLGAV

SEQ ID NO: 170 - protein, 8 aa, Artificial Sequence
  Description of Artificial Sequence: Illustrative peptide
DLTKLGDV
